(19) United States
(12) Patent Application Publication
(10) Pub. No.: US 2005/0037344 A1
(43) Pub. Date: Feb. 17, 2005

(54) Nucleic acid array

(75) Inventors: Bruno Stuhlmuller, Berlin (DE); Thomas Haupl, Erkner (DE)

Correspondence Address: WELSH & KATZ, LTD, 120 S RIVERSIDE PLAZA, 22ND FLOOR, CHICAGO, IL, 60606, US

(73) Assignee: PathoArray GmbH, Berlin (DE)

(21) Appl. No.: 10/278,698

(22) Filed: Oct. 23, 2002

(30) Foreign Application Priority Data
Nov. 9, 2001 (DE) 101 55 600.4-41

(51) Int. Cl. C12Q 1/68; C12M 1/34

(52) U.S. Cl. 435/6; 435/287.2

(57) ABSTRACT

It is proposed to use selectioned monocyte macrophage genes to provide tools for diagnostic, prognostic and therapy-monitoring analysis and for performing screenings for pharmacologically active substances and substance classes of chronic inflammatory diseases, chronic inflammatory diseases induced by bacteria, arteriosclerosis, tumors, organ and tissue transplantations, and sepsis when examining blood, tissue, purified or cultivated cells.

[0001] Tools for diagnostic, prognostic and therapy-monitoring analysis and for performing screenings for pharmacologically active substances and substance classes of chronic inflammatory diseases, chronic inflammatory diseases induced by bacteria, arteriosclerosis, tumors, organ and tissue transplantations, and sepsis when examining blood, tissue, purified or cultivated cells

[0002] This invention relates to tools for diagnostic, prognostic and therapy-monitoring analysis of chronic inflammatory diseases, chronic inflammatory diseases induced by bacteria, arteriosclerosis, tumors, organ and tissue transplantations, and sepsis when examining blood, tissue, purified or cultivated cells

[0003] Acute and chronic inflammatory processes in the blood and vascular system and in tissue may result in pathologic sediments, fibrotic transformation processes, and immediate destruction of tissues and organs.

[0004] The cells of the monocyte/macrophage system are greatly involved in the activation and maintenance of inflammatory cascades in blood and tissue as may occur in the course of inflammatory rheumatic diseases, bacteria-induced inflammatory diseases, tumors, organ and tissue transplantations, arteriosclerosis, and sepsis. Monocytes and macrophages are highly activated in the course of these diseases, display changes in the set of their surface molecules, contact other cells, and excrete certain messenger substances that keep the inflammatory process going. In addition to unspecific inflammatory reactions, specific stimulation of the immune system may occur.

[0005] Autoaggressive reactions can occur that are either mediated by the pathogen or have other causes (e.g. external, environmental factors such as radiation, toxins, or allergens) or may in part be caused by genetic predisposition. These may develop as excessive reactions in the course of the unspecific or specific inflammatory and defense reaction and result in damage to, or the destruction of, organ systems. Monocytes and macrophages are assigned a major part in these autoaggressive reactions, too.

[0006] The molecular processes in monocytes and macrophages that contribute to such a chronic inflammation and/or autoaggression are widely undetermined. There is an urgent need to study these (1) for diagnostic reasons, that is, classification and pathophysiological evaluation of the disease, (2) for prognostic reasons and optimum utilization of therapeutic options, (3) for therapeutic reasons to monitor an existing treatment or to develop new therapeutic approaches.

[0007] Current anti-inflammatory treatments for chronic inflammatory diseases from the rheumatic group of diseases are unspecific and often only have limited power to hinder the inflammatory process in its course and intensity. The diseases frequently progress until organs are damaged or even completely destroyed.

[0008] Autoimmune diseases and/or inflammatory diseases can in principle affect any organ system. The following list is exemplary: diseases of the skeletal and support structure (rheumatoid arthritis, reactive arthritis, Bechterew's disease, osteoarthritis and abrasion-related synovitis), of the colon (colitis ulcerosa and Crohn's disease), of the liver (autoimmunohepatitis, chronic viral hepatitis, primary biliary zirrhosis), endocrine organs (pancreas: juvenile type-I diabetes; thyroid gland: Hashimoto thyroiditis, Basedow's disease), of the skeletal muscles (polymyositis, or dermatomyositis when the skin is involved), the myocardium (rheumatic fever, dilatative cardiomyopathy, viral myocarditis), the skin (sclerodermia, psoriasis, neurodermitis), the lungs (pulmonary fibrosis, Goodpasture's syndrome, chronic obstructive lung disease, sarcoidosis), the brain or central nervous system (multiple sclerosis) and the cardiovascular system (vasculitis, arteriosclerosis) as well as chronic diseases of multiple organs (systemic lupus erythematosus, Sjögren's syndrome, systemic sclerosis, sepsis) and tumors.

[0009] Rheumatoid arthritis is a chronic inflammatory joint disease that results in progressive destruction of the affected joints. Both the monocytes circulating in the peripheral blood and the further differentiated cells of the monocyte/macrophage system that are present in the joint as synovial macrophages and dentritic cells show cell activation. This is reflected in comparable transcription patterns for proteins that are characteristic for inflammations (messenger substances, proteases, etc.). Rheumatoid arthritis could as yet be diagnosed using the clinical ACR criteria and by pathohistological examination of the affected tissue. The disease frequently was in a relatively advanced stage, and the joint already had suffered irreversible damage. Thus therapeutic measures are more often than not applied too late, when autoaggressive damage has been done and become irreversible.

[0010] It can be expected from studying gene expression profiles that a new molecular characterization of the disease will be possible and allow its classification into subgroups according to pathophysiological characteristics. In addition, the aggressive nature of the disease may be forecast. This would influence the selection and intensity of medication at an early point in time.

[0011] And regarding the as yet mainly unspecific therapeutic measures, it can be expected that knowledge of the molecular mechanisms of chronic inflammations will also point to specific candidates based on which treatment concepts can be developed. This can be achieved by specific biological substances, relevant antagonists, or by natural pharmacological substances or chemically acting specific substances that directly interfere with the inflammatory cycle of the monocyte/macrophage system.

[0012] Numerous areas with infiltrated cells of the monocyte/macrophage system containing characteristic gene expression patterns are found in tumors of the hemopoietic system or in tumor diseases with neoplastic changes. These gene expression patterns contain both inflammation-specific gene expressions and tumor-specific gene expressions.

[0013] With sepsis and bacteria-induced abrasion-related synovitis, cells of the monocyte/macrophage system are activated by bacterial infection, primarily via liposaccharides, and once again comprise a generally similar gene expression pattern as non-bacterial inflammatory diseases but also a specific gene pattern induced by bacteria. Thus the two types of abrasion-related synovitis without a bacterial trigger can be distinguished from bacteria-induced abrasion-related synovitis by their gene patterns.

[0014] In the case of arteriosclerosis, monocytes are already activated in the peripheral blood and excited to bind destroyed, inflammation-specific arterial regions. Communication by cell-to-cell contact with endothelial cells contributes to keeping activation and recruitment of the monocyte/macrophage system going.

[0015] Leading microarray manufacturers (Affymetrix, Clontech, Nanogene) currently offer commercial microarrays that contain from 4,000 up to 12,000 accidental genes in each set. Several sets that cover a total of 48,000 genes are required for an overall transcription analysis of all gene units. With a total number of ca. 40,000 genes (=ca. 120,000 individual gene variants) of the human genome, there is an extraordinary small coverage regarding the total number of different transcripts. Obviously this procedure is expensive and requires a major effort in terms of biometrical analysis while its hit quota is low when it comes to detecting disease-specific, cell-specific genes.

[0016] It is the problem of this invention to provide tools that are suited for diagnostic, prognostic, and therapy-monitoring analyses and for performing screenings for pharmacologically active substances and substance classes of rheumatoid arthritis, other chronic inflammatory diseases, infectious diseases, tumors, arteriosclerosis, organ and tissue transplantations, and sepsis.

[0017] This problem is solved by the characteristics listed in claim 1.

[0018] According to the invention, tools are to be used for this that use sequences of a selection of the genes listed below or sequences of all genes listed below, including other genes, or that use RNA that is complementary to the genes listed:

TABLE 1
Cytokines and factors and ligands:

| | |
|---|---|
| Interleukin-1α | (Acc. # NM_000575) |
| Interleukin-1β | (Acc. # NM_000576) |
| Interleukin-6 | (Acc. # AF372214) |
| Interleukin-8 | (Acc. # L19591) |
| Interleukin-10 | (Acc. # XM_001409) |
| Interleukin-13 | (Acc. # HSU62858) |
| Interleukin-15 | (Acc. # XM_003529) |
| Interleukin-16 | (Acc. # AF053412) |
| Interleukin-18 | (Acc. # E17135) |
| Angiopoietin-like factor (CTD6) | (Acc. # XM_001529, XM_042319) |
| Inhibin β-B (INHBB) | (Acc. # NM_002193) |
| Tumor necrosis factor-α | (Acc. # NM_000595) |
| Tumor necrosis factor -β | (Acc. # D12614) |
| Transforming growth factor-β (TGF-β) | (Acc. # XM_008912, NM_00660) |
| Latent TGF-β binding prot. LTBP4 | (Acc. # NM_003573, XM_008868) |
| Melanoma stimulating activity (MGSA) | (Acc. # X54489) |
| Chemokine Gro-α/MGSA | (Acc. # X12510, XM_003504) |
| Chemokine (C-X-C motif) ligand 16 | (Acc. # NM_022059) |
| Chemokine alpha-3 (CKA3) | (Acc. # NM_002993) |
| CC-Chemokine (SLC) | (Acc. # AB002409) |
| EBI-1-ligand chemokine | (Acc. # AB000887) |
| Small inducible cytokine subfamily A(SCYA21) | (Acc. # XM_048450) |
| Small inducible cytokine (SCYA21) | (Acc. # NM_002989) |
| Megakaryocyte stimulating factor | (Acc. # U70136) |
| Monocyte colony stimulating factor (M-CSF) | (Acc. # NM_000757) |
| Granulo-/Monocyte colony stimu. factor (GM-CSF) | (Acc. #: E01817) |
| Macrophage inflammatory Protein (MIP-1) | (Acc. # HUMMIP1A) |
| Makrophage inflammatory Protein (MIP-2 | (Acc. # AF106911) |
| Monocyte migration inhibitory factor (MIF) | (Acc. # L19686) |
| Monocyte tissue factor | (Acc. # M16553) |
| Monocyte chemoattractant protein-1 (MCP-1) | (Acc. # S71513) |
| Monocyte chemoattractant protein-2 (MCP-2) | (Acc. # NM_005623) |
| Monocyte chemoattractant protein-3 (MCP-3) | (Acc. # X72308; S57464) |
| Fraktalin small inducible cytokine | (Acc. # NM_002996) |
| Stromal derived factor-1 (SDF-1) | (Acc. # HSU16752) |
| Insulin-like growth factor-5 bind. Protein | (Acc. # NM_000599) |

Receptors, ion channels and associated proteins:

| | |
|---|---|
| Angiotensin receptor-II homolog (ATR-IIh) | (Acc. # L48211) |
| Toll-like receptor-2 | (Acc. # XM_003304) |
| Toll-like receptor-4 | (Acc. # XM_005336) |
| Opoid receptor kappa | (Acc. # XM_011716) |
| Interleukin-1 receptor | (Acc. # XM_002686) |
| Interleukin-2 receptor α-subunit | (Acc. # XM_043149) |
| Interleukin-2 receptor β-subunit | (Acc. # XM_009962, M26062) |
| Interleukin-2 receptor γ-subunit | (Acc. # XM_047675) |
| Interleukin-7 receptor | (Acc. # AH007043, NM_008372) |
| Interleukin-8 receptor α (IL8RA) | (Acc. # XM_058007) |
| Interleukin 8 receptor β (IL8RB) | (Acc. # NM_001557 |
| Fc-receptor-I | (Acc. # J03619, AF200220) |
| Fc-receptor-II | (Acc. # M28696, M28697) |
| Fc-receptor-III | (Acc. # Z46223, Z46223) |
| Tumor necrosis factor-α receptor | (Acc. # S63368) |
| C-Chemokine (C-C motif) receptor-5 (CCR5) | (Acc. # NM_000579, XM_030397) |
| C-Chemokine (C-C motif) receptor-7 (CCR7) | (Acc. # XM_049959) |
| Chemokine-X-C-receptor-4 (CXCR-4) | (Acc. # NM_003467) |
| Progesterone recept.-assoc. immunophilin(FKBP54) | (Acc. # U42031) |
| Partial p58 gene for NK receptor | (Acc. # AJ000542) |
| Vascular endothelial growth factor | (Acc. # AY047581) |
| Vascular endothelial growth factor-β | (Acc. # BC008818) |
| Calcium activated potassium channel (KCNN3) | (Acc. # AF031815, AY049734) |
| G protein-coupled cytokine receptor EBI1 | (Acc. # L31581) |
| G protein-coupled cytokine receptor EBI3 | (Acc. # XM_012857, L08187) |
| EBI3-associated protein | (Acc. # U41806) |

Membrane proteins and associated proteins:

| | |
|---|---|
| CD14 | (Acc. # XM_003822) |
| CD68 | (Acc. # XM_008237) |
| CD69 | (Acc. # BC007037) |
| CD11b | (Acc. # J03925) |
| Adhesion receptor CD44 | (Acc. # M31165) |
| Actin binding coronin-like protein (HCORO1) | (Acc. # U34690) |
| Integral membrane protein | (Acc. # L32185) |
| Epithelial membrane prot.-3 (EMP-3)/HMPMP-1 | (Acc. # X94771, U87947) |
| Mac-2 binding protein | (Acc. # L13210) |
| Integral membrane protein E16 | (Acc. # M80244) |
| HLA-D II beta chain | (Acc. # X03066) |
| Desmin | (Acc. # HSU59167, XM_002601) |
| Fibronectin precursor | (Acc. # X02761) |
| Adducin 1α | (Acc. # X58141, NM_014190) |
| HLA DRB1 | (Acc. # X88971) |
| Integrin-α 5 subunit | (Acc. # X06256) |
| Integrin cytopl. domain assoc. protein (Icap-1α) | (Acc. # AF012023) |
| Integrin cytopl. domain assoc. protein (Icap-1β) | (Acc. # AF012024) |
| Titin | (Acc. # X69490, NM_003319) |
| Thrombospondin-1 (TSP-1) | (Acc. # XM_007606) |
| Semaphorin-3 | (Acc. # AB000220) |
| Semaphorin-F homolog | (Acc. # U52840) |
| TSP-2 | (Acc. # NM_003247) |
| TSP-1/Semaphorin-5a Homolog | (Acc. # NM_003966) |
| VCAM-1 | (Acc. # X53051) |
| Periplakin (PPL) | (Acc. # XM_032727, NM_002705) |
| Envoplakin (EVPL) | (Acc. # XM_008135) |
| Peripheral myelin protein 22 (PMP-22) | (Acc. # XM_052499) |

(Proto)-onco-, tumor-suppressor-, differentiating genes & assoc. proteins:

| | |
|---|---|
| H19 RNA | (Acc. # M32053) |
| Tumor suppressor Brush-1 | (Acc. # S69790) |
| Pim-2 protooncogene | (Acc. # U77735, XM_010208) |
| HOX-B3 | (Acc. # N70814) |
| MEL-18 | (Acc. # D13969) |
| c-fos | (Acc. # V01512) |
| c-jun | (Acc. # NM_002229) |
| c-myc | (Acc. # AH001511) |
| c-myc related oncogene (pHL-1) | (Acc. # X54629) |
| c-Ret tyrosine kinase receptor ligand 2 (RETL2) | (Acc. # U97145) |
| c-Ret tyrosine kinase receptor ligand 1 (RETL1) | (Acc. # U97144) |
| jun-B | (Acc. # XM_009064) |
| c-Jun activation domain binding protein | (Acc. # U65928) |
| Desmoyokin/AHNAK | (Acc. # X74818, M80899) |
| Rad mRNA | (Acc. # L24564) |
| PTEN | (Acc. # AH005966, XM_005867) |
| c-ras homolog gene family, member B (ARHB) | (Acc. # XM_002689, NM_004040) |
| Transforming activity oncogene (TRE-2) | (Acc. # X63596) |
| Transforming activity oncogene (TRE-17 | (Acc. # HSTRE213) |
| Kruppel-like fetal globin gene activator (FKLF) | (Acc. # AF272830) |
| c-fos related antigen (fra-1) | (Acc. # X16707) |
| c-fos related antigen (fra-2) | (Acc. # X16706) |

Acute phase protein:

| | |
|---|---|
| Large ferritin subunit | (Acc. # M11146) |
| Small ferritin subunit | (Acc. # NM_000146) |

Enzymes, enzyme-associated proteins and inhibitors:

| | |
|---|---|
| Activation-induced cytidine deaminase | (Acc. # AB040431, NM_020661) |
| Phospholipase-C | (Acc. # XM_041310) |
| Prostaglandin G/H Synthase | (Acc. # S36271) |
| Prostaglandin-Endoperoxide Synthase-1 | (Acc. # NM_000962) |
| Cyclooxygenase-1 | (Acc. # HSU63846) |
| Cyclooxygenase-2 | (Acc. # M90100) |
| Endothelin-1 (EDN1) | (Acc. # NM_001955) |
| Endothelin-1 (EDN2) | (Acc. # NM_001956) |
| Clustrin (complement lysis inhibitor, SP-40, 40) | (Acc. # XM_027447, X14723) |
| Fatty acid desaturase 1 (FADS1) | (Acc. # AF084558) |
| Cysteine dioxygenase 1 (CDO-1) | (Acc. # U80055) |
| Histidine biosynthesis protein | (Acc. # NM_007016) |
| Chitinase 1 | (Acc. # NM_003465) |
| Chitinase precursor | (Acc. # AF290004) |
| L-glycerol-3-phosphat: NAD oxidoreductase | (Acc. # L34041) |
| Alcohol dehydrogenase class I gamma subunit | (Acc. # M12272) |
| Procarboxypeptidase B1 | (Acc. # NM_001871) |
| Phosphoenolpyruvate carboxykinase (PCK1) | (Acc. # XM_009672, L05144) |
| Lysozyme | (Acc. # BC004147) |
| Transaldolase | (Acc. # NM_006755) |
| Thymosin-β4 | (Acc. # M17733) |
| Metallothionein 1L (MT1L) | (Acc. # NM_002450) |
| Manganese-superoxide dismutase (Mn-SOD) | (Acc. # S77127) |
| Superoxide dismutase 1 | (Acc. # K00065) |
| Superoxide dismutase 2 | (Acc. # NM_000636) |
| Superoxide dismutase 3 | (Acc. # NM_003102) |
| Copper/zinc-superoxide dismutase (Cu/Zn-SOD) | (Acc. # M13267) |
| Catalane | (Acc. #) |
| Monoamine oxidase-A (MAOA) | (Acc. # M68840, XM_055485) |
| Fatty acid synthetase | (Acc. # U29344) |
| Glutathion peroxidase | (Acc. # X13710) |
| Glutathion peroxidase 3 | (Acc. # NM_002084) |
| Glucocerebrosidase | (Acc. # M16328) |
| Inducuble nitric oxide synthase | (Acc. # AB022318) |
| Transglutaminase 1 (K polypeptide) | (Acc. # XM_007310) |
| Transglutaminase (TGase) | (Acc. # M55153, SEG_HUMETG)* |
| α-1-Antitrypsin | (Acc. # HSATPR1) |
| Protein tyrosin phosphatase | (Acc. # U27193) |
| Carbonic anhydrase precursor (CA 12) | (Acc. # AF037335) |
| Metallothionein-IG gene (MT1G) | (Acc. # J03910) |
| Lymphocyte phosphatase assoc. protein (LPAP) | (Acc. # X97267, AA011257) |
| Flap endonuclease 1 DNA repair gene (FEN1) | (Acc. # AC004770) |
| Flap structure-specific endonuclease 1 (FEN1) | (Acc. # L37374, XM_043386) |

Kinases, protein kinases (PKN) and PKN inhibitors:

| | |
|---|---|
| Protein kinase C-alpha subunit | (Acc. # X52479) |
| Protein kinase C-beta-1 subunit | (Acc. # XM_047187) |
| Protein kinase C-beta-2 subunit | (Acc. # M13975) |
| Protein kinase C-gamma subunit | (Acc. # M34182) |
| Protein kinase C-delta subunit | (Acc. # D10495) |
| Protein kinase-C inhibitor | (Acc. # U51004 |
| Ik-Kinase-κ | (Acc. # AF029684 |
| PI3-Kinase | (Acc. # Y13892) |
| MAP Kinase-11 | (Acc. # XM_035889) |
| p38 MAP kinase | (Acc. # AF031135) |
| p38 MAP kinase interacting protein | (Acc. # XM_035930) |
| Serin/threonin kinase | (Acc. # AB015982) |
| Tyrosine kinase-1 | (Acc. # XM_002037) |
| Tyrosine kinase-2 | (Acc. # XM_005480) |
| Non-receptor protein tyrosine kinase tyk2 | (Acc. # X54637) |
| Mitogen- and stress-activated protein kinase-1 | (Acc. # AF074393) |
| Mitogen- and stress-activated Protein Kinase-2 | (Acc. # AF074715) |
| Casein kinase 1, alpha 1 (CSNK1A1) | (Acc. # NM_001892, L37042) |
| Tyrosine kinase 1 (TIE-1) | (Acc. # XM_002037) |
| Tyrosine kinase 2 (TIE-2) | (Acc. # XM_005480) |

Differentiation genes:

| | |
|---|---|
| WNT-6 | (Acc. # AY009401, AB059570) |
| WNT-13 | (Acc. # Z71621) |
| BMP-4 | (Acc. # M22490) |

Proteinases, matrix metalloproteinases (MMP) and MMP-inhibitors:

| | |
|---|---|
| Cathepsin-B | (Acc. # XM_035662) |
| Cathepsin-G | (Acc. # M16117) |
| Cathepsin-K | (Acc. # NM000396) |
| Cathepsin-L | (Acc. # NM_001912) |
| Cathepsin-S | (Acc. # M86553) |
| Matrix metalloproteinase-1 (MMP-1) | (Acc. # NM_002421) |
| MMP-3 | (Acc. # X05232) |
| MMP-9 | (Acc. # XM_009491) |
| Disintrigin protease | (Acc. # Y13323) |
| Tissue inhibitor of MMP type 1 (TIMP-1) | (Acc. # NM_003254) |
| TIMP-2 | (Acc. # NM_003255) |
| TIMP-3 | (Acc. # NM_000362) |
| TIMP-4 | (Acc. # NM_003256) |
| Serin protease-like mRNA | (Acc. # M17016) |

Apoptosis and cell cycle regulators:

| | |
|---|---|
| Annexin A-2II | (Acc. # BC001388) |
| Growth arrest DNA-damage-induc. prot. (GADD45) | (Acc. # M60974) |
| Growth arrest DNA-damage-induc. prot.α(GADD45A) | (Acc. # XM_056975, XM_040594) |
| Growth arrest DNA-damage-induc. prot.β(GADD45B) | (Acc. # NM_015675, AF087853) |
| Growth arrest DNA-damage-induc. prot.g(GADD45G) | (Acc. # NM_006705) |
| Lymphocyte G0/G1 switch gene (GOS-3) | (Acc. # L49169) |

Signal transduction regulators:

| | |
|---|---|
| STAT-1 | (Acc. # NM_007315) |
| STAT-4 | (Acc. # XM_002711) |
| Adenylate kinase 1 (AK1) | (Acc. # NM_000476) |
| Inositol 1,4,5-trisphosphate 3-kinase (ITPKC) | (Acc. # XM_047369, XM_047368) |
| Phosphatidylinositol-3′-kinase (PI3K) | (Acc. # Y11312) |

Transcription factors, translation factors and associated proteins:

| | |
|---|---|
| Transcription factor AREB6 | (Acc. # D15050) |
| Transcription factor 8 (TCF8) | (Acc. # XM_030006) |
| Nuklear factor kappa-B | (Acc. # M58603) |
| AP-1 | (Acc. # AB015319, AB015320) |
| PU.1 | (Acc. # X66079) |
| SPI-B | (Acc. # X66079) |
| v-maf musculoaponeurotic fibrosarcoma (MAFF) | (Acc. # XM_039249, XM_039250) |
| Zinc finger transcription factor (GKLF) | (Acc. # AF105036, AK026253) |
| Zinc finger protein | (Acc. # M80583) |
| CCAATA enhancer binding protein-beta | (Acc. # NM_005194) |
| RNA-polymerase II elongation factor | (Acc. # L47345) |
| Translation elongation factor-1 α-1 (EEF1A1) | (Acc. # BC009733) |
| Translation elongation factor-1 α-2 (EEF1A2) | (Acc. # XM_028863) |
| Translation elongation factor 2 (EEF2) | (Acc. # NM_001961) |
| L1-Element (L1.20) | (Acc. # U93569) |
| Leukemia zinc finger PLZF | (Acc. # AF060568) |
| Activating transcription factor 3 (ATF3) | (Acc. # XM_016795, XM_034219) |
| Zinc finger transcriptional regulator (GOS-24) | (Acc. # M92843) |
| TGF-β-inducing early growth response 2 | (Acc. # AA427597) |
| SP1-like zinc finger transcript. factor (TIEG2) | (Acc. # AF028008) |
| snRNA activating protein complex | (Acc. # AF032387) |
| oct-binding factor-1 (OBF-1) | (Acc. # Z49194) |
| Early growth response protein 1 (EGR-1) | (Acc. # R75775) |

Ribosomal/ribonuclear regulator genes and associated proteins:

| | |
|---|---|
| hnRNP pseudogen(gp43) (position: 97.026-98.073) | (Acc. # AL034397) |
| Ribosomal protein L19 | (Acc. # XM_002758) |
| Ribosomal protein S13 | (Acc. # XM_039215) |
| Histon-H1 (0) family mRNA | (Acc. # X03473) |
| H4-histone family, member H (H4FH), mRNA | (Acc. # NM_003543) |

Others:

| | |
|---|---|
| IER-3 | (Acc. # NM_003897) |
| Endoplasmatic glycoprotein Gp36 | (Acc. # U10362) |
| Natural resist.-assoc. macroph.protein (Nramp1) | (Acc. # D50402) |
| Calgranulin - S100A12 protein | (Acc. # XM_001682, NM_005621) |
| 14-3-3 gamma protein | (Acc. # AF142498) |
| Serum amyloid-A | (Acc. # M81349, M81451) |
| GDF-1 | (Acc. # NM_001492) |
| Solute carrier family 7 mRNA (SLC7A5) | (Acc. # NM_003486) |
| PLAB/MIC-1 | (Acc. # NM_004864) |
| EAP-(HBp15/L22) | (Acc. # NM_006755) |
| Small proline-rich protein-1 | (Acc. # L05187) |
| NAG-1 | (Acc. # AF173860) |
| BST-1 | (Acc. # D21878) |
| II56KD | (Acc. # M24594) |
| Fibulin-1 D | (Acc. # NM_006486) |
| Nebulin | (Acc. # XM_040435) |
| VDUP1 upregulated by 1,25-dihydroxyvitamin D-3 | (Acc. # XM_002093, XP_002093) |
| Tumor necrosis factor stimulated gene (TSG-6) | (Acc. # NM_007115) |
| Tumor necrosis factor stimulated gene (TSG-37) | (Acc. # M31164) |
| Osteopontin | (Acc. # AF052124) |
| Tristetraproline (TTP) | (Acc. # M63625) |
| Nephropontin | (Acc. # M83248) |
| Tonsillar lymphocyte LD78 mRNA | (Acc. # X03754) |
| MB-1 gene (CD79a-B cell) | (Acc. # U05259) |
| Human glycoprotein (gp39) | (Acc. # M80927, Y08374) |
| Glia derived nexin precursor | (Acc. # AI743134) |
| Heat shock protein 70B (HSP-70B) | (Acc. # X51757) |
| Apolipoprotein D | (Acc. # XM_049984, XM_003067) |
| Dead box, Y isoform (DBY), altern.transcr. 2 | (Acc. # AF000984) |
| Myocilin (GLC1A) | (Acc. # AH006047) |
| DR1-associated corepressor (DRAP1) | (Acc. # U41843) |
| DR1-associated protein 1 (neg. cofactor 2 α) | (Acc. # XM_055156) |
| FK506 bind.-12-rapamycin assoc.prot.1 (FRAP1) | (Acc. # XM_001528, XM_042283) |
| Microfibril-associated glycoprotein-2 (MAGP-2) | (Acc. # AH007047, NM_003480) |
| Adrenomedullin (ADM) precursor | (Acc. # NM_001124, XM_051743) |
| DNA-damage-inducible transcript 3, clone MGC: 4154 | (Acc. # BC003637) |
| Calretinin - calcium binding protein | (Acc. # X56667) |
| Breakpoint cluster region (BCR) mRNA | (Acc. # XM_017097) |
| Adipose most abundant gene transcript 1 (APM1) | (Acc. # NM_004797, XM_003191) |
| Novel adipose specific collagen-like factor | (Acc. # D45371) |

Genes and ESTs with unknown functions:

| | |
|---|---|
| IMAGE 745750 | (Acc. # AA420624) |
| KIAA0935 | (Acc. # AB023152) |
| KIAA0618 | (Acc. # AB014518) |
| Homolog to FLJ23382 fis clone HEP16349 | (Acc. # AK027035) |
| Hypothetical gene mRNA | (Acc. # XM_005331) |
| HDCMB07P/PCM-1 | (Acc. # AF068293) |
| cDNA clone DKFZp762M2311 | (Acc. # AL512760) |
| cDNA clone PP2684 | (Acc. # AF218004) |
| cDNA clone MGC: 1811 (IMAGE: 3506276) | (Acc. # BC015961) |
| cDNA clone IMAGE: 979127 | (Acc. # AA522530) |
| cDNA clone IMAGE: 4279495 5′, mRNA sequence | (Acc. # Bf667722) |
| cDNA clone 137308 mRNA, partial cds | (Acc. # U60873) |
| cDNA clone IMAGE: 159541 | (Acc. # H15814) |
| cDNA clone MAMMA1001272 | (Acc. # AU147646) |
| cDNA clone IMAGE: 2419382 | (Acc. # AI826771) |
| cDNA clone IMAGE: 3941411 | (Acc. # BE797145 |
| cDNA clone IMAGE: 3834583 | (Acc. # BE743390) |
| cDNA clone IMAGE: 4565371 | (Acc. # BG397372) |
| cDNA clone MGC: 2460 IMAGE: 2964524 | (Acc. # BC009504) |
| cDNA clone RC3-HT0585-010400-013-all HT0585 | (Acc. # BE176664) |
| cDNA clone similar to CG8974 gene product | (Acc. # XM_018516) |
| cDNA clone BSK-65 | (Acc. # W99251) |
| cDNA clone IMAGE: 3844696 | (Acc. # BE730665) |
| FLJ23382 fis, clone HEP16349 | (Acc. # AK027035) |
| FLJ20500 fis, clone KAT09159 | (Acc. # AK000507, BC015236) |
| GABBR1 region of AL031983 | (Acc. # 12329558) |
| cDNA clone CS0DE006YI10 5′ prime end | (Acc. # AL541302) |
| cDNA clone CS0DE006YI10 3′ prime end | (Acc. # AL541301) |
| EST371586 IMAGE resequences | (Acc. # Aw959516) |
| MEN1 region clone epsilon/beta | (Acc. # Af001892) |

Control genes for quantification adjustment:

| | |
|---|---|
| alpha-Aktin | (Acc. # M20543) |
| beta-Aktin | (Acc. # XM_037239) |
| gamma-Aktin | (Acc. # NM_001614) |
| Glyceraldehyde-3-phosphate-dehydrogenase | (Acc. # XM_033258) |
| Glucose-6-phosphate-dehydrogenase | (Acc. # XM_013149) |
| 28S rRNA | (Acc. # M27830) |
| 18S rRNA | (Acc. # M10098) |

[0019] TABLE 2

BSK-66 or accession # AA393029
CGGTTGGGGCTCTGGTCTTGGATTTGATGTGTGGCGAAGGCTGCAATTGTTTAATAA
CCCTTCATGATTCAACAGCTCTTCAAGAACTTTCCTCTGTTCTTGTGTGGAGCTCGT
GACAGCCAGTGGTGGTGGAGCTCCAGCCCTCTCTTCCCACAGGCACAAGCCGGGTTC
CTGAGTCCCAGGGCTTCTCGGGAGGTGTCTGCCCTCCTCTTTCAGACACCCTCTGCC
CTGTGTCCCAGGGCCCTGGGCCTGTGCTGCACTGAGCAGAGACTGTAGGGGACCGGC
TCTCCCACTCCTCCCAGATGGGCAGCGTCTTCCGTGTCGGGAGCATGCTGTGCTGCT
TTTCTCTTCTCAGTCTCTTAGTTTTTGCGGGTTCTTACGCATGTGAGGTGTGGACTT
GCATGGTGGGGAGCTCAAATGGTACATGAAGGGGAGGAGCCCTCTGAGTGCTGTGAT
TTGTTCCATCATTACCGCTTCCTGATCACGGTGACCTGCACTGCTGGAGTGGTCAGT
GGAGCCAGGCCTCCCCACAACAGTGTTCCCATCGCCTTCTTACTATTGATTTCTATT
CTTAAAATATTGTATTACTTAGCACTCTTTTGAAGACGTTCCAGTATATATCAAATG
ATCAAAAGTCCATAACCTTGTCCTACGTAGAAGCCAAAGGTGTCATGCAGTTTCAGG
TGTTCGAGTTTCCAGAATTCTTGTGATGACATTTGTAGGATTCTTCTTTTAGACTTG
GACCAAATTCTGTAACCTAATATTTGTCCTTCAGATTGACAGAGAACCGCAGGCAGG
TGTTTTCTCTGTCACACGTGTGGTGGGTGGCATCCTGGTGACATAAAGAATTGCCTT
TGGTAACTTGCCCAGAAGGCTGTAGGCTTATTTTCTGCTTAGACTTTCCCCTATTTC
TTTCTTTTCTTTTCTCG
BSK-89 or accession # AA574456 - forward
ATTTTAGGGACGTAGTAGATGATTTTTAGCGAATTTGATCGGCCAGAAGAACATACA
ATGGATTGGGACAAAGTCTGTTGGGCAGACAATGGTTTGTGACAAAATTCTGTCCAG
GTGTGTTGACCGAATTCAGGCTTTCTTTATGCGATATGAGTTCAGTTAATGAAAACA
CAGGGGAGTGACCAGAAGTGATTGTTTCCTTCTTTGGCGTTTCTGTCTTCCTCCTTT
TTTGTTCTATTCCCTTATTTTGCAACCTTTTGGATGTTACCCTTTGGAAGTTACCCT
CTTGTAACTTCCACATTAAAAGTTTGGGGGCTGGCTGATANAAGGAACTCCAGAGAA
CAACTTGATTCTCTGCTTTGGGAGAGACAGANAAATGAGGGGTGTCGAGGAAGGTCA
GANACACCCTGAGGCCTCTGCCTNCTTCAGCATGTCANAGCACCCTATTTTGGGGCT
TGCTTTCTGAGCCCNAACATCTCCACCCTTCCANGANTCTGTGGCTTATCCTTCCCA
ANGATAGGATCACTTGNCACTCTACTGANCCTAAGTTGTATTCANTTTCTTTTGATC
CGCCTNGACTCTNTAGCNANTGANAANCACAACNTGGNAACNAACCCTCATAAANCT
GCTNTANCTTCTGGTTTTAAGNNCAAAACA
BSK-89 or accession # AA574456 - reverse
CGCACATGTGGTGGCTACTAGTTCCTGGAATAGCAAAGCAATTCCTACCTCCATGCC
TTTTCAGTTGCTTTAGATAAGACCTGTTTTGCACCTGAGAAAACAGAAAGATCAGAG
CAGCTTTTTTGTGTGTTTTGTTTACACAGTGTTGTTGTATTTTCATTTGCTCTAGAC
TTCAAGGCAGATGCAAAAGAAAATGAAAAACAACTTAGGTTCAGTAGACTGGTCAAG
TGATCCTATTCCTTTGGCCAAGGATATGCCACAGACTCCTGGAAGGCTGGAGATGTT
GGGGCTCAGAAAGCAATACCCCAAAATAGGGTGCTTTGACATGCTCAAGTGAGGCAG
AAGCCTCACGGTCTCTCTCACCTTCCTCCACACCCCTCATTTCTCTGTCTCTCCCAA
AGCACAGAATCAAGTTGTTCTCTGGAGTTCCTTCTATCTGCCAGCCCCCAAACTTTT
AATGTGGAAGTTACAAGACGGTAACTTCCAAAGGCTAACATCCAAAAGGTTGCAAAA
TAAGGGAATAGAACAAGAAAGGAGGAACACAGAGACGCCAAAGAACGAAACAATCAC
TTCTGGTCACTCCCCTGTGTTTTCATTAACTGAACTCATATCGCATAAAGAAAGCCT
GAATTCGGTCGACACACCTGGACAGAATTTTGTCACTAACCATTGTCTGCCCAACAG
ACTTTGTCCCAATCCATTGTATCTTCTTCAGGCCCATCAAATTCCCTAAAAATCATC
TACTACCTCCCTAAAAT
BSK-67 or accession # AA574454
CGGTCAACCCAACACAGGCATGCTCATAAGGAAAGGTTAAAAAAAGCAAAAGGAACT
CGGCAAATCTTACCCCGCCTGTTTACCAAAATCATCACCTCTAGCATCACCAGCATT
AGAGGCACCGCCTGCCCAGTGACACATGTTTAACGGCCGCGGTACCCTAACCGTGCA
AAGGTAGCATAATCACTTGTTCCTTAAGTAGGGATCGGCTTGAATGGCTCCACGAGG
GTTCAGCTGTCTCTTACTTTTAACCAGTGAAATTGACCTGCCCGTGAAGAGGCGGGC
ATAACACAGCAAGACGAGAAGACCCTATGGAGCTTTAATTTATTAATGCAAACAGTA
CCTAACAAACCCACAGGTCCTAAACTACCAAACCTGCATTAAAAATTTCGGTTGGGG
CGACCTCGGGGCAGAACCCAACCTCCGAGCAGTACATGCTAAGACTTCACCAGTCAA
AGCGAACTACTATACTCAATAGATCCAATAACTTGACCAACGGAACAAGTTACCCTA
GGGATAACAGCGCAATCCTATTCTAGAGTCCATATCAACAATAGGGTTTACGACCTC
GATGTTGGATCAGGACATCCCAATGGTGCAGCCGCTACTAAAGGTTCGTTTGTTCAA
CGATTAAAGTCCTACGTGATCTGAGTTCAGACCGGAGTAATCCAGGTCGGTTTCTAT
CTACTTCAAATTCCCG
BSK-80 or accession # AA574455
CGTTCACTCCTGCCTGGGCAACGAAGAGTGAAACTCCATCTCAAAACAAACAAACAA
ACAAACAAACAAGCAAAAGCACTCTAGGTATAAAAGGAACTTCCTCTGCCTGCAAGA
CCCCCCATCTCCTTCCCATGAAGTCCTTAACTTCTGTTCAACCCAAACGCCCAGCGC
GTCCCTTCCACTGCGCTGCCCGATGCACCTCTGCCCGCCACGCCTTCAGTGTTGTGG
TCATTTGTGCCTGCGCACCCAGGGCTGCAGGTACCTTCCTCCAGTGTGCTTCCAGGA
CGGGTTATTCAGGATGCTGAGACGAGCCGCCAGCTTCACACAGAACTGGGGTGAGAC
CTCAGCACCTGCTGCCTGTGTTCCTGAGGCTGTCTGCCAAGGCGCTCAGGAAACGCA
CATGCCTCCTGACCCTCATATGCACACCTCGTGGACGGCAGCCTGCAGGACCACTGG
CAAGTTTTGTTGCCGAAATCCCTCTTCGAGGAAAAAAGTCAATTGTTGGCAATTAGA
TATTAAGATCACATAACTCACTTCAATCAGTCGTCTAAAAACAAACGGCTGATACCA
CTGAGTCTCAAGGAAGCAGCCACAGGGGCTTCTGCTGAGGGGGCAGGCGGAGCTTGA
GGAAACCGCAGATAAGTTTTTTTCTCTTTGAAAGATAGAGATTAATACAACTACTTA
AAAAATATAGTCAATAGGTTACTAAGATATTGCTTAGCGTTAAGTTTTAACGTAATT
TTAATAGCTTAAAATTTTAAGAGAAAATATGAAGACTTAGAAGAGTACCATGAGGAA
GGAAAAGATAAAAGGTTTCTAAAACATGACGGAGGTTGAGATGAAGCTTCTTCATGG
AGTAAAAAATGTATTTAAAAGAAAATTGAGAGAAAGCG
BSK-83 or accession # AI046025
GTTTTTAGGGTTCTTTAGTGTTGTTTCTTTCACCCAGGGGTGGTGGTCCCAGCCAGT
TTGGTGCTGACGGTGAGAGGAAATTAGAATCTGTTTGCAAATTGTCCAACCCACCCC
CTCAACATGAGGGGCTTCCATTTTCTGTGTTTTGTAAGGGAACTGTTTCCTTCATGC
CGCCATGTTCCTGATATTAGTTCTGATTTCTTTTTAACAAATGTTATCATGATTAAG
AAAATTTCCAGCACTTTAATGGCCAATTAACTGAGAATGTAAGAAAATTGATGCTGT
ACAAGGCAAATAAAGCTGTTTATTAACCTTG
BSK-83-2 - forward
GTTCAAACAGCAAACGCCCACAGATGGCCCAGAGGTGGTGGTAGTCAGGGTGTGTGG
GTGTTTTTAGGGTTCTTTAGTGTTGTTTCTTTCACCCAGGGGTGGTGGTCCCAGCCA
GTTTGGTGCTGACGGTGAGAGGAAATTAGAATCTGTTTGCAAATTGTCCAACCCACC
CCCTCAACATGAGGGGCTTCCATTTTCTGTGTTTTGTAAGGGAACTGTTTCCTTCAT
GCCGCCATGTTCCTGATATTAGTTCTGATTTCTTTTTAACAAATGTTATCATGATTA
AGAAAATTTCCAGCACTTTAATGGCCAATTAACTGAGAATGTAAGAAAATTGATGCT
GTACAAGGCAAATAAAGCTGTTTATTAACCTTG
BSK-78 -3- forward
ATCAACTTTCGATGGTAGTCGCCGTGCCTACCATGGTGACCACGGGTGACGGGGAAT
CAGGGTTCGATTCCGGAGAGGGAGCCTGAGAAACGGCTACCACATCCAAGGAAGGCA
GCAGGCGCGCAAATTACCCACTCCCGACCCGGGGAGGTAGTGACGAAAAATAACAAT
ACAGGACTCTTTCGAGGCCCTGTAATTGGAATGAGTCCACTTTAAATCCTTTAACGA
GGATCCATTGGAGGGCAAGTCTGGTGCCAGCAGCCGCGGTAATTCCAGCTCCAATAG
CGTATATTAAAGTTGCTGCAGTTAAAAAGCTCGTAGTTGGATCTTGGGAGCGGGCGG
GCCGGTCCGCCGCGAGGCGAGCCACCGCCGTNCNCGCCCTTGCCTCTCGGCGCCCCC
TNGATGCTCTTAGCTGANTGTCCCGCGGGGCCCGANCCGTTTACTTTGAAAAAATTT
NAGTGTTAAAGCANGCCCGAACCGCTGGATACCCGNNNTAGGAATAATCGATTANGA
CCNNGGNNCTNTTTGNNGGTTTCNGACTGAGCCNTATTAANANGGAC
J-4 or accession # AI046024
AAAACGACGGCCAGTGAATTGTAATACGACTCACTATAGGGCGAATTGGGCCCTCTA
CATGCATGCTCGAGCGGCCGCCAGTGTGATGGATATCTGCAGAATTCGGCTTTTGAC
ACCAGACCAACTGGTAATGGTAGCGACTGGCGCTCAGCTGGAATTCCGCCTGGGACT
ACCGGGTCTCACTCCAGAAGAGGCTTCTTCAGAGCATGGTAGTCTTGGGGTTCTAAC
AGAATGAGAGTAGAAGCTGCAAAACCTCTTGAAACTGGGGCTTGGGAGTCACACATG
ACTTTCTCCACATTCTGTTCGTCAAAAGCGAATCATAAGGACAGCACAGACTCAAGG
GATAAG
M-3 or accession # AI048523
AAACGACGGCCAGTGAATTGTAATACGACTCACTATAGGGCGAATTGGGCCCTCTAG
ATGCATGCTCGAGCGGCCGCCAGTGTGATGGATATCTGCAGAATTCGGCTTTTKACA
CCAGACCAACTGGTAATGGTAGCCACCGGTTCTCAGCTGGAATTCCGGATTGGTCCA
ATTGGGTATGAGGAGTTCAGTTATATGTTTGGGATTTTTTAGGTAGTGGGTGTTGAG
CTTGAACGCTTTCTTAATTGGTGGCTGCTTTTAGGCCTACTATGGGTGTTAAATTTT
TTACTCTCTCTACAAGGTTTTTTCCTAGTGTCCAAAGAGCTGTTCCTCTCTTGGACT
AACAGTTAAATTTACAAGGGGATTTAGAGGGTTCTGTGGGGCAAATTTAAAGTTGAA
CTAAGATTCTATCTTGGACAACCAGCTATCACCAGGCTCGGTAGGTTTGTTGCCTCT
NCCTATAAATCTTCCCACTATTTTTGTACATAGACGGGTGTTCTCTTTT
HOX-B3
GTTCAGTAATTATCTTTTATTTCATTTTCTCCCCTTCCCACCCCTCCCCCTCGGATC
CAGCAGAGGGCTGTGGTGGCGGCGGCGTCCAAGCGGGCGCGGACGGCGTACACGAGC
GCGCANTGGTGGAGCTGGAGAAGGAGTTCCATTTTAACCGCTACCTGTGCCGGCCTC
GCGTTGTAGAGATGGCCAACCTGCTGAACCTCAGCGAGCGGCAGATCAAGATCTCTC
CTCTCACCACGCGCCTCCTCCTCAGGGTAGAATCCAAGAAGCGCCCAAATTAACACA
CCTTACATCTTTGTAGGTAATTCCCCCCAAATCTTGATTTTTTTTTTCCTCAANTAT
CGGTTTCTTCCACGAAACCTAAACTTTCACAATCCTCTTCCGCNGCCACAAAGAAGG
TGTCACGTGACCCGAAAGCCAAACACCATTG
Thymosin-beta-4
ACAACTCGGTGGTGGCCACTGCGCAGACCAGACTTCGCTCGTACTCGTGCGCCTCGC
TTCGCTTTTCCTCCGCAACCATGTCTGACAAACCCGATATGGCTGAGATCGAGAAAT
TCGATAAGTCGAAACTGAAGAAGACAGAGACGCAAGAGAAAAATCCACTGCCTTCCA
AAGAAACGATTGAACAGGAGAAGCAAGCAGGCGAATCGTAATGAGGCGTGCGCCGCC
AATATGCACTGTACATTCCACAAGCATTGCCTTCTTATTTTACTTCTTTTAGCTGTT
TAACTTTGTAAGATGCAAAGAGGTTGGATCAAGTTTAAATGACTG
TGCTGCCCCTTTCACATCAAAGAACTACTGACAACGAAGGCCGCGCTGCCTTTCCCA
TCTGTCTATCTATCTGGCTGGCAGGGAAGGAAAGAACTTGCATGTTGGTGAAGGAAG
AAGTGGGGTGGAAGAAGTGGGGTGGGACGACAGTGAAATCTAGAGTAAAACCAAGCT
GGCCCAAGTGTCCTGCAGGCTGTAATGCAGTTTAATCAGAGTGCCATTTTTTTTT
Glucocerebrosidase or acc. #: M16328
CCATTAGGCCTATGAATTATAAGATACAGTCACTTTAAAATCCACTGGAAGGCTGAA
GAGTGAGTTAAACCTCTTATAATGAATATACAGTGAAACCAGTAGAGGCATTTTATT
TAGGGTTCCTACAAGAAAGTGCTTAAATAGCATCGACGCCTACATGCTACATCCTGT
TCAGTCTCTGCCTCTGTGATGCAGTTGGCCAGCAAATATCCTCCAAGTCATCATTTG
CATAGTGCTAGGGATAAAATGAGGAGCAATACCAAATGCTATACCTGCCCTTATGGG
TCTTATAGTCCAACGGGAGAAAAAGATATTATACAAATAATCACGGAAAATAAATAG
AAAACGCATCCTTGTTTTTGTTTAGTGGATCCTCTATCCTTCAGAGACTCTGGAACC
CCTGTGGTCTTCTCTTCATCTAATGACCCTGAGGGGATGGAGTTTTCAAGTCCTTCC
AGAGAGGAATGTCCCAAGCCTTTGAGTAGGGTAAGCATCATGGCTGGCAGCCTCACA
GGTTTGCTTCTACTTCAGGCAGTGTCGTGGGCATCAGGTGCCCGCCCCTGCATCCCT
AAAAGCTTCGGCTACAGCTCGGTGGTGTTGTCTGCAATGCCACATACTGTGACTCCT
TTGACCCCCCGACCTTTCCTGCCCTTGGTACCTTCAGCCGCTATGAGAGTACACGCA
GTGGGCGACGGATGGAGCTGAGTATGGGGCCCATCCAGGCTAATCACACGGGCACAG
GCCTGCTACTGACCCTGCACCCAGAACAGAAGTTCCAGAAAGTGAAGGGATTTGGAG
GGGCCATGACAGATGCTGCTGCTCTCAACATCCTTGCCCTGTCACCCCCTGCCCAAA
ATTTGCTACTTAAATCGTACTTCTCTGAAGAAGGAATCGGATATAACATCATCCGGG
TACCCATGGCCAGCTGTGACTTCTCCATCCGCACCTACACCTATGCAGACACCCCTG
ATGATTTCCAGTTGCACAACTTCAGCCTCCCAGAGGAAGATACCAAGCTCAAGATAC
CCCTGATTCACCGAGCCCTGCAGTTGGCCCAGCGTCCCGTTTCACTCCTTGCCAGCC
CCTGGACATCACCCACTTGGCTCAAGACCAATGGAGCGGTGAATGGGAAGGGGTCAC
TCAAGGGACAGCCCGGAGACATCTACCACCAGACCTGGGCCAGATACTTTGTGAAGT
TCCTGGATGCCTATGCTGAGCACAAGTTACAGTTCTGGGCAGTGACAGCTGAAAATG
AGCCTTCTGCTGGGCTGTTGAGTGGATACCCCTTCCAGTGCCTGGGCTTCACCCCTG
AACATCAGCGAGACTTCATTGCCCGTGACCTAGGTCCTACCCTCGCCAACAGTACTC
ACCACAATGTCCGCCTACTCATGCTGGATGACCAACGCTTGCTGCTGCCCCACTGGG
CAAAGGTGGTACTGACAGACCCAGAAGCAGCTAAATATGTTCATGGCATTGCTGTAC
ATTGGTACCTGGACTTTCTGGCTCCAGCCAAAGCCACCCTAGGGGAGACACACCGCC
TGTTCCCCAACACCATGCTCTTTGCCTCAGAGGCCTGTGTGGGCTCCAAGTTCTGGG
AGCAGAGTGTGCGGCTAGGCTCCTGGGATCGAGGGATGCAGTACAGCCACAGCATCA
TCACGAACCTCCTGTACCATGTGGTCGGCTGGACCGACTGGAACCTTGCCCTGAACC
CCGAAGGAGGACCCAATTGGGTGCGTAACTTTGTCGACAGTCCCATCATTGTAGACA
TCACCAAGGACACGTTTTACAAACAGCCCATGTTCTACCACCTTGGCCACTTCAGCA
AGTTCATTCCTGAGGGCTCCCAGAGAGTGGGGCTGGTTGCCAGTCAGAAGAACGACC
TGGACGCAGTGGCACTGATGCATCCCGATGGCTCTGCTGTTGTGGTCGTGCTAAACC
GCTCCTCTAAGGATGTGCCTCTTACCATCAAGGATCCTGCTGTGGGCTTCCTGGAGA
CAATCTCACCTGGCTACTCCATTCACACCTACCTGTGGCATCGCCAGTGATGGAGCA
GATACTCAAGGAGGCACTGGGCTCAGCCTGGGCATTAAAGGGACAGAGTCAGCTCAC
ACGCTGTCTGTGACTAAAGAGGGCACAGCAGGGCCAGTGTGAGCTTACAGCGACGTA
AGCCCAGGGGCAATGGTTTGGGTGACTCACTTTCCCCTCTAGGTGGTGCCCAGGGCT
GGAGGCCCCTAGAAAAAGATCAGTAAGCCCCAGTGTCCCCCCAGCCCCCATGCTTAT
GTGAACATGCGCTGTGTGCTGCTTGCTTTGGAAACTNGCCTGGGTCCAGGCCTAGGG
TGAGCTCACTGTCCGTACAAACACAAGATCAGGGCTGAGGGTAAGGAAAAGAAGAGA
CTAGGAAAGCTGGGCCCAAAACTGGAGACTGTTTGTCTTTCCTAGAGATGCAGAACT
GCGCCCGTGCAGCAGCAGTGTCACCATCAGGGCCGAAGCCTTAAAGCAGCAGCGGGT
GTGCCCAGCCACCCACATGATTCCTATGGCACCAGCCAGGAAAAATGGCAGCTCTTA
AAGGAGAAAATGTTTGAGCCC
PU.1 (Spi-1) or accession # X66079
CCACCATGCTCGCCCTGGAGGCTGCACAGCTCGACGGGCCACACTFCAGCTGTCTGTACC
CAGATGGCGTCTTCTATGACCTGGACAGCTGCAAGCATTCCAGCTACCCTGATTCAGAGG
GGGCTCCTGACTCCCTGTGGGACTGGACTGTGGCCCCACCTGTCCCAGCCACCCCCTATG
AAGCCTTCGACCCGGCAGCAGCCGCTTTTAGCCACCCCCAGGCTGCCCAGCTCTGCTACG
AACCCCCCACCTACAGCCCTGCAGGGAACCTCGAACTGGCCCCCAGCCTGGAGGCCCCG
GGGCCTGGCCTCCCCGCATACCCCACGGAGAACTTCGCTAGCCAGACCCTGGTTCCCCCG
GCATATGCCCCGTACCCCAGCCCTGTGCTATCAGAGGAGGAAGACTTACCGTTGGACAGC
CCTGCCCTGGAGGTCTCGGACAGCGAGTCGGATGAGGCCCT
CGTGGCTGGCCCCGAGGGGAAGGGATCCGAGGCAGGGACTCGCAAGAAGCTGCGCCTGT
ACCAGTTCCTGCTGGGGCTACTGACGCGCGGGGACATGCGTGAGTGCGTGTGGTGGGTG
GAGCCAGGCGCC
GGCGTCTTCCAGTTCTCCTCCAAGCACAAGGAACTCCTGGCGCGCCGCTGGGGCCAGCAG
AAGGGGAACCGCAAGCGCATGACCTACCAGAAGCTGGCGCGCGCCCTCCGAAACTACGC
CAAGACCGGCGAGATCCGCAAGGTCAAGCGCAAGCTCACCTACCAGTTCGACAGCGCGC
TGCTGCCTGCAGTCCGCCGGGCCTGAGCACACCCGAGGCTCCCACCTGCGGA
GCCGCTGGGGGACCTCACGTCCCAGCCAGG
ATCCCCCTGGAAGAAAAAGGGCGTCCCCACACTCTAGGTGATAGGACTTACGCATCCCC
ACCTTTTGGGGTAAGGGGAGTGCTGCCCTGCCATAATCCCCAAGCCCAGCCCGGGCCTGT
CTGGGATTCCCCACTTGTGCCTGGGGTCCCTCTGGGATTTCTTTGTCATGTACAGACTCCC
TGGGATCCTCATGTTTTGGGTGACAGGACCTATGGACCACTATACTCGGGGAGGCAGGGT
AGCAGTGCTTCCAGAGTCCCAAGAGCTTCTCTGGGATTTTCTTGTGATATCTGATTCCCCA
GTGAGGCCTGGGACCTTTTTAAGATCGCTGTGTGTCTGTAAACCCTGAATCTCATCTGGG
GTGGGGGCCCTGCTGGCAACCCTGAGCCCTGTCCAAGGTTCCCTCTTGTCAGATCTGAGA
TTTCCTAGTTATGTCTGGGGCCCTCTGGGAGCTGTTATCATCTCAGATCTCAACGCCCATC
TATGGCTGTGTTGTCACATCTGTCCCCTCATTTTTGAGATCCCCCAAAACTCTGGAACTAT
TCTGCTGCCCCTTTTTATGTGTCTGGAGTCCCCAATCACATCTAGGGCTCCTCC
Mel-18 or accession # : D13969
GAGAGCCCGAACAGGAAGAGGGTACAGCTTTGTGCAGGTCACATGCCCACTGCAGCCCT
CCAGCCTCTGGTCCCCAGAGCGGACTTTGGAAGCTGAACTGCTTTTGAAGCTGGAAGACT
TATGTTATAATTTTACCCTGGGTGGACCAGGGTCGTACAAAAGGGCAACGCTCCCCAGTCC
CCCCACTCCCGACCCCGGAATCATGCATCGGACTACACGGATCAAAATCACAGAGCTGA
ACCCCCACCTCATGTGTGCCCTCTGCGGGGGGTACTTCATCGACGCCACCACTATCGTGG
AGTGCCTGCATTCCTTCTGCAAAACCTGCATCGTGCGCTACCTGGAGACCAACAAATACT
GCCCCATGTGTGACGTGCAGGTCCATAAAACCCGGCCGCTGCTGAGCATCAGGTCTGACA
AAACACTTCAAGACATTGTCTACAAATTGGTCCCTGGGCTTTTTAAAGATGAGATGAAAC
GGCGGCGGGATTTCTATGCAGCGTACCCCCTGACGGAGGTCCCCAACGGCTCCAATGAG
GACCGCGGCGAGGTCTTGGAGCAGGAGAAGGGGGCTCTGAGTGATGATGAGAAAGTCAG
CCTCTCCATCGAATTCTACGAAGGTGCCAGGGACCGGGATGAGAAGAAGGGCCCCCTGG
AGAATGGGGATGGGGACAAAGAGAAAACAGGGGTGCGCTTCCTGCGATGCCCAGCAGC
CATGACCGTCATGCATCTTGCCAAGTTTCTCCGCAACAAGATGGATGTGCCCAGCAAGTA
CAAGGTGGAGGTTCTGTACGAGGACGAGCCACTGAAGGAATACTACACCCTCATGGACA
TCGCCTACATCTACCCCTGGCGGCGGAACGGGCCTCTCCCCCTCAAGTACCGTGTCCAGC
CAGCCTGCAAGCGGCTCACCCTAGCCACGGTGCCCACCCCCTCCGAGGGCACCAACACC
AGCGGGGCGTCCGAGTGTGAGTCAGTCAGCGACAAGGCTCCCAGCCCTGCCACCCTGCC
AGCCACCTCCTCCTCCCTGCCCAGCCCAGCCACCCCATCCCATGGCTCTCCCAGTTCCCAT
GGGCCTCCAGCCACCCACCCTACCTCCCCCACTCCCCCAACGACAGCCA
GTGGGGCCACCACAGCTGCCAACGGGGGTAGCTTGAACTGCCTGCAGACACCATCCTCC
ACCAGCAGGGGGCGCAAGATGACTGTCAACGGCGCTCCCGTGCCCCCCTTAACTTGAGG
CCAGGGACCCTCTCCCTTCTTCCAGCCAAGCCTCTCCACTCCTTCCACTTTTTCTGGGCCC
TTTTTTCCACTTCTTCTACTTTCCCCAGCTCTTCCCACCAAGGGGGTGGGGGGCGGGTTTT
ATAAATAAATATATATATATATGTACATAGGAAAAACCAAATATACATACTTATTTTCTA
TGGACCAACCAGATTAATTTAAATGCCACAGGAAACAAACTTTATGTGTGTGTGTATGTG
TGGAAAATGGTGTTCATTTTTTTTGGGGGGGGTCTTGTGTAATTTGCTGTTTTTGGGGGTG
CCTGGAGATGAACTGGATGGGCCACTGGAGTCTCAATAAAGCTCTGCACCATCCTCGCTG
TTTCCCAAGGCAGGTGGTGTGTTGGGGGCCCCTTCAGACCCAAAGCTTTAGGCATGATTC
CAACTGGCTGCATATAGGAGTCAGTTAGAATTGTTTCTTTCTCTCCCCGTTTCTCTGCC
CATCTTGGCTGCTGTCCTGCCTCTGACCAGTGGCCGCCCCCCGCGTTGTTGAATGTCCAGA
AATTGCTAAGAACAGTGCCTTTTACAAATGCAGTTTATCCCTGGTTCTGAGGAGCAAGTG
CAGGGTGGAGGTGGCACCTGCATCACCTCCTCCTCTTGCAGTGGAAACTTTGTGCAAAGA
ATAGATAGTTCTGCCTCTTTTTTTTTTTTTTCCTGTGTGTGTGGCCTTTGCATCATTTATCTT
GTGGAAAAGAAGATTCAGGCCCTGAGAGGTCTCAGCTCTTGGAGGAGGGCTAAGGCTAA
AGCATTGTGAAGCGCTGCACCCCCACCAACCTTACCCTCACCGGGGAACCCTCACTAGCA
GGACTGGTGGTGGAGTCTCACCTGGGGCCTAGAGTGG
AAGTGGGGGTGGGTTAACCTCACACAAGCACAGATCCCAGACTTTGCCAGAGGCAAACA
GGGAATTCCGCCGATACTGACGGGCTCCAGGAGTCGTCGCCACACTCG
BSK-87-5 - reverse
GGTAATACTTAGAGCATTACAAAGCACTTTCACATTTAAATTTGATTTTGGAAAGTA
TTTTCTTTTTGAGACAGAGTCTCTGTCACCCAGGCTGGAGTGCATGGAGTGCAGTGG
TGCAAACACAGCTCGCTGCACCCTCAACCTCCTGGGCTCAAGCAGTCTTTCCACCTC
GGCCTCCCAAGTTGCTAGGACTATAGGACTACAG
BSK-88-1 forward
TGAGCTTGAACGCTTTCTTAATTGGTGGCTGCTTTTAGGCCTACTATGGGTGTTAAA
TTTTTTACTCTCTCTACAAGGTTTTTTCCTAGTGTCCAAAGAGCTGTTCCTCTTTGG
ACTAACAGTTAAATTTACAAGGGGATTTAGAGGGTTCTGTGGGCAAATTTAAAGTTG
AACTAAGATTCTATCTTGGACAACCAGCTATCACCAGGCTCGGTAGGTTTGTCGCCT
CTACCTATAAATCTTCCCACTATTTTGCTACATAGACGGGTGTGCTCTTTTAGCTGT
TCTTAGGTAGCTCGTCTGGTTTCGGGGGTCTTAGCTTTGGCTCTCCTTGCAAAGTTA
TTTCTAGTTAAT
BSK-88-1- reverse
ATTAACTAGAAATAACTTTGCAAGGAGAGCCAAAGCTAAGACCCCCGAAACCAGACG
AGCTACCTAAGAACAGCTAAAAGAGCACACCCGTCTATGTAGCAAAATAGTGGGAAG
ATTTATAGGTAGAGGCGACAAACCTACCGAGCCTGGTGATAGCTGGTTGTCCAAGAT
AGAATCTTAGTTCAACTTTAAATTTGCCCACAGAACCCTCTAAATCCCCTTGTAAAT
TTAACTGTTAGTCCAAAGAGGAACAGCTCTTTGGACACTAGGAAAAAACCTTGTAGA
GAGAGTAAAAAATTTAACACCCATAGTAGGCCTAAAAGCAGCCACCAATTAAGAAAG
CGTTCAAGCTCA
BSK-88-1-2 - forward
GCCGCCTATTTCCTCCGAAACCCGCGCTGCGGAGCAGCCCAGTGCATAGAGTTCAAC
ACTTCCCCTTGTTGTGGAAAGTAAAGGAGCCTCACTACCACCTTTTTTTCTTTGCGT
TTTCTTACTGCTGGTCCTGGGAGCCTTTTCCTTCGGAGCAGCAGCCCTGTCCGGCAT
CTGTCTTGAGCTCCCAGCAAGGAAAGTCCATCAGCTTGATAATGGAGGAGAACAATG
ACTCCACGGAGAACCCCCAACAAGGCCAAGGGCGGCAGAATGCCATCAAGTGTGGGT
GGCTGAGGAAGCAAGGAGGCTTTGTCAAGACTTGGCATACTCGCTGGTTTGTGCTCA
AGGGGGATCAGCTCTATTATTTCAAAGATGAAGATGAAACCAAGCCCTTGGGTACTA
TTTTTCTGCCTGGAAATAAAGTTTCTGAGCATCCCTGCAATGAAGAGAACCCAGGGA
AGTTCCTTTTTGAAGTAGTTCCAGGTAAGATATTTTCCTAGTCTGATTAAATTATTG
CATCCTGGGTGGTAAAGGTGAANATGGGTCAAACAGGNTTCATTCTTTTTTGAATCA
TGACTGAGACCTTAATTTGAGGCTTGGNTAATGGTGACCCAAATAATGATGCAGGGT
TATTTCTAATCAAATGAATGCCTCCCCACTACTNTGACACATAATATAAATTTATTT
GNCATGAACTCATANTGACCCANNNTGAG
BSK-88-1-2- reverse
GCAAAACCTCCTTGAAGATACAATTTTGTGAGGAAATATGTCAGTGATTCCACTGGG
CAAAGCATTCAACCTATAACCCCTTGTCAAATTTCACATCACAAGAGCGCTGTAAAA
TCAAATTCATCTCCAATAGTCCTGAACAAATACTGTATCATGACTTGTGGTCAACTA
TGGAGTCTCATGGACAAATGAAAATCTANTAGTTATGTGGNCANAGTATGTGTGNGN
GANCGCATTCATTNGNNCTANNATATAANCNTG
BSK-88-2 - forward
TGAGCTTGAACGCTTTCTTAATTGGTGGCTGCTTTTAGGCCTACTATGGGTGTTAAA
TTTTTTACTCTCTCTACAAGGTTTTTTCCTAGTGTCCAAAGAGCTGTTCCTCTTTGG
ACTAACAGTTAAATTTACAAGGGGATTTAGAGGGTTCTGTGGGCAAATTTAAAGTTG
AACTAAGATTCTATCTTGGACAACCAGCTATCACCAGGCTCGGTAGGTTTGTCGCCT
CTACCTATAAATCTTCCCACTATTTTGCTACATAGACGGGTGTGCTCTTTTAGCTGT
TCTTAGGTAGCTCGTCTGGTTTCGGGGGTCTTAGCTTTGGCTCTCCTTGCAAAGTTA
TTTCTAGTTAAT
BSK-88-2 - reverse
ATTAACTAGAAATAACTTTGCAAGGAGAGCCAAAGCTAAGACCCCCGAAACCAGACG
AGCTACCTAAGAACAGCTAAAAGAGCACACCCGTCTATGTAGCAAAATAGTGGGAAG
ATTTATAGCTAGAGGCGACAAACCTACCGAGCCTGGTGATAGCTCGTTGTCCAAGAT
AGAATCTTAGTTCAACTTTAAATTTGCCCACAGAACCCTCTAAATCCCCTTGTACAA
TTTAACTGTTAGTCCAAAGAGGAACAGCTCTTTGGACACTAGGAAAAAACCTTGTAG
AGAGAGTAAAAAATTTAACACCCATAGTAGGCCTAAAAGCAGCCACCAATTAAGAAA
GCGTTCAAGCTCA
BSK-88-3 - forward
GTGTGACTTCACCGAAGACCAGACCGCAGAGTTCAAGGAGGCCTTCCAGCTGTTTGA
CCGAACAGCTGATGGCAAGATCCTGTACAGCCAGTGTGGGGATGTGATGAGGGCCCT
GGGCCACAACCCTACCAACGCCGAGGTGCTCAAGGTCCTGGGGAACCCCAAGAGTGA
TGAGATGAATGTGAAGGTGCTGGACTTTGACCACTTTCTGCCCATGCTGCAGACAGT
GGCCAAGAACAAGGACCAGGGCACCTATGAGGATTATGTCGAAGGACTTCGGGTGTT
TGACAAGGAAGGAAATGGCACCGTCATGGGTGCTGAAATCCGGCATGTTCTTGTCAC
ACTGGGTGAGAAGATGACAGAGGAAGAAGTANAGATGCTGGTGGCAGGGCATCAGGA
CAGCAATGGTTGTATCAACTATGAAGAGCTCGTCCGCATGGTGCTGAATGGCTGAGG
ACCTTCCCAGTCTCCCAAATCCGTGCCTTTCCCTGTGTGAATTTTGTATCTACCTAA
AAGTTTCCCTAGCTTTTTTGTTCANCACTTTCCATTTGTTTTNTTGATGATGTTGCC
GCACATTCACCAATAACTTGTTTTTGGCC
BSK-88-3 - reverse
GGCCCAGAGAGCAAGTTTATTTGGTGAATGCTGACGGCAAACATCATCCAAGAGAGA
CAAGATGGGAAAGTTGCTGAGACAAGAAAGCCTACGGAAACTTTAGGCTAGATACAA
AATTCACACAGGGAAAGGCACGGACTCTGGGGAGACTGGGAAGGTCCTCAGCCATTC
AGCACCATGCGGACGAGCTCTTCATAGTTGATACAACCATTGCTCTCCTCATGCCCT
GCCACCAGCATCTCTACTTCTTCCTCTGTCATCTTCTCACCCAGTGTGACAAGAACA
TGCCGGATTTCAGCACCCATGACGGTGCCATTTCCTTCCTTGTCAAACACCCGAAGT
CCTTCGACATAATCCTCATAGGTGCCCTGGTCCTTGTTCTTGGCCACTGTCTGCAGC
ATGGGCAGAAAGTGCTCAAAGTCCAGCACCTTCACATTCATCTCATCACTCTTGGGG
TTCCCCAGGACCTTGAGCACCTNGGCGTTGGTAGGGTTCTGGCCCAAGGCCCTCATC
ACATCCCCACACTGGCTGNCAGGATCTTGCAT
BSK-1D1 - forward
TTCAGTTTCCTCTCCTAGTAGTACACGAGTCTCCATTGTTTCACATCCTCACCAGTG
CTTTGTATTGTCTGACTTTTAAGATTCTGCTCATCAGACATATGTAAATGACACATA
ACACAGTTTGTTTTCACAGAACAAATGGTTATTTAAATTCTAAACCCAAAGTAATGT
ACAATTACAATAAAAGGCCAGAAGAAAGAGGAGGAAGGAAAAAGATGTGAGAAATAA
AATTGTTATAGTAATTCTTGTTTTCGCTTCCAAGCATAAAATAGTAATTGGAATGTT
TAGTGTGCATGTGTGTATACAATGCAATATGATACAATATAAAAGCAATGCCTCTCT
TTGTTCCATTGGTTGNTTTTTAAATCTATTTTTATAAGTAATAAG
BSK-1E10-9
CTGGAATCTAGATAGTTTTCAGGATGGGGAAGATAGATTCAAAACCACCTAAGGGCA
TTCTGGGTACAAAGCATTGTGCAAGGCTTTGGTGATACAGAGAATAAGGTCTTTTTT
CCCATACTTCCTCATCTGCCAAGGTTATCTCCAATTGTACCTTTCTCTCCAGTTCCA
AGCTTGC
BSK-1L2-1 - forward
CGGTAAATTTTTTACTCTCTCTACAAGGTTTTTTCCTAGTGTCCAAAGAGCTGTTCC
TCTTTGGACTAACAGTTAAATTTACAAGGGGATTTAGAGGGTTCTGTGGGCAAATTT
AAAGTTGAACTAAGATTCTATCTTGGACAACCAGCTATCACCAGGCTCGGTAGGTTT
GTCGCCTCTACCTATAAATCTTCCCACTATTTTGCTACATAGACGGGTGTGCTCTTT
TAGCTGTTCTTAGGTAGCTCGTCTGGTTTCGGGGGTCTTAGCTTTGGCTCTCCTTGC
AAAGTTATTTCTAGTTAATTCATTATGCAGAAGGTATAGGGGTTAGTCCTTGCTATA
TTATGCTTGGTTATAATTTTTCATCTTTCCCTTGCCGAAATTCCG
BSK-1K9-B1 - forward
GTCAGAAAACCACACATGCAGACCCAGAGAGAATGGTTTCTTTGTGGTTTGCACAGG
AAAAACCATCCTTACTAAAAGACAGGGTAGAGTGGGGAGGGTGCAGGAAGGAACTCA
TAATGACCATTTTCCCACATGGAGAAGCAAAGCAGCTTCTTCAGGGCTCAATCAGTT
ATGAAAAAGAATCTCACCCCATTAGATAGCACTCCTGAGCTCAGTGTAGGGTCCCAA
GCCCACCAACCAAGGCTGTCTCCCCAGAACAAATCAGGAAGGCTCCAGTGGTCAGAT
AGAAAGTGACAAACAAAACATGAGTGCATCTAGCCACATCCTCACATTCCACACAAG
AGAACCCATGTGACTAAACAGGAATCCCCTGCTGCCCCAGTTCTAAAAAGGAACTAC
TGACTGCCAGTGCAATTTCTT
BSK-1K9-B1 - reverse
CAAGGAAATTGCACTGTGCAGTCAGTAGTTCCTTTTTAGAACTGGGTGCAGCAGGGG
ATTCCTGTTTAGTCACATGGGTTCTCTTGTGTGGAATGTGAGGATGTGGCTAGATGC
ACTCATGTTTTGTTTGTCACTTTCTATCTGACCACTGGAGCCTTCCTGATTTGTTCT
GGGGAGACAGCCTTGGTTGGTGGGCTTGGGACCCTACACTGAGCTCAGGAGTGCTAT
CTAATGGGGTGAGATTCTTTTTCATAACTGATTGAGCCCTGAAGAAGCTGCTTTGCT
TCTCCATGTGGGAAAATGGNCATTATGAGTTCCTTTCTGCACCCTCCCCACTCTACC
CTGTCTTTTANTAAGGATGGGTTTTNCTGTGCAAACCACAAAGAAACCNTTCTCTCT
GGG
BSK-2A15-A1 - forward
TGCAGCTCGCCTTGCACAACAGGAAAAACAANAACAAGTTAAAATTGAGTCTNTNGC
CAANAGCTTAAAAAATGCTNTGAGGCAAACTGCAAGTGTCACTNTGCAGGCTATTGC
AGCTCAAAATGCTGCGGTCCAGGCTGTCAAT
BSK-2A15-A1 - reverse
GCATTGACAGCCTGGACCGCAGCATTCTGAGCTGCAATAGCCTGCAGAGTGACACTT
GCAGTTTGCCTCAGAGCATCTTCTAAGCTCTTGGCTAGAGACTCAATTTTAACTTGT
TCTTGTTTTTCCTGTTGTGCAAGGCGAGCTGCAT
BSK-2A15-D3 - forward
GCTGGAACAGAATAGCCTGGAACAGGATCTTTCGTTCCATAATATTTTTTAATTAGA
GCAAGTCCTGCTACTGTATCTGTTCCTTTGAAGTTAACCAAGTGAGCAGATGCTCCT
ATGCCAGCAGTCTCTTGGGAAGAGACTCCTCTGTAGCCAAAATCATGTAACTTGTAT
TCCAGACCATCTAAGTTACCAGAAGTTTCTAACAAATATTTGGCCAATATTTTCTTC
TGCTCTCTAGAATTTGTGGCCACTGTCATTGGATACCAGGACTGAACAAGAATAGTC
TCAATCCAATTTGTAAGCCAGTAACACTCTGGATCTGTGTTTTCCACCGTGAAGAAA
CATTTCCTCTGGGAATGACAAANCCCTCANGAACAGCTTTTATTTCTATTGGAAGAT
GCCCATCATACTTCTCAAGAATGGAGTTCCTCCCTTTTCATTAAAGACATCATCTTG
GAAATGTTCTTTGTAGACATCTTTGGCTTCCTGGATTTCTCTTTGGGTACTACTTTA
CCTTTTAAGNACTTATTAANAAAGNACTGNACCCATAAAAACTGGNNCTCATATTTA
NCTTCCTTAATTGGAGGNTNTGNTTNTTTTACGGNTTCAAAGANGAAAAAATTTCTT
GNGTGGGGGGANTTG
BSK-2A15-D3 - reverse
GCCGCGCCAGGGAGCTCGCGGCGCGCGGCCCCTGTCCTCCGGCCCGAGATGAATCCT
GCGGCAGAAGCCGAGTTCAACATCCTCCTGGCCACCGACTCCTACAAGGTTACTCAC
TATAAACAATATCCACCCAACACAAGCAAAGTTTATTCCTACTTTGAATGCCGTGAA
AAGAAGACAGAAAACTCCAAATTAAGGAAGGTGAAATATGAGGAAACAGTATTTTAT
GGGTTGCAGTACATTCTTAATAAGTACTTAAAAGGTAAAGTAGTAACCAAAGAGAAA
ATCCAGGAAGCCAAAGATGTCTACAAAGAACATTTCCAAGATGATGTCTTTAATGAA
AAGGGATGGAACTACATTCTTGAGAAGTATGATGGGCATCTTCCAATAAAAATAAAA
ACTGTTCCTGAGGGCTTTGTCATTTCCANAGCAAATGTTTCTTNNCGGGGGAAAACA
CAGATCCNAAGGGGNACTGGNTTACAAATTGGATTGAGANTATTCTTGGTNANNCCT
CGGATCCAATCCAAGGGCGCCCAAATT
BSK-2A3-A2 - forward
CACGAGCGCACGTGTTAGGACCCGAAAGATGGTGAACTATGCCTGGGCAGGGCGAAG
CCAGAGGAAACTCTGGTGGAGGTCCGTAGCGGTCCTGACGTCCAAATCGGTCGTCCG
ACCTGGGTATAGCGGCGAAAGACTAATCGAACCATCTAGTAGCTGGTTCCCTCCGAA
GTTTCCCTCAGGATAGCTGGCGCTCTCGCAGACCCGACGCACCCCCGCCACGCAGTT
TTATCCGGTAAAGCGAATGATTAGAGGTCTTGGGGCCGAAACGATCTCAACCTATTC
TCAAACTTTAAATGGTAANAAGCCCGGCTCGCTTGGCGTGGAGCCGGGCGTGGAATG
CNAGTGCCTAATGGGCCACTTTTGGTAANCAAAACTGGCGCTGCGGGATGAACCCAA
CGCCCGGTTAANGGGCCCNATGCCGACCTCATNANACCCCANAAAANGNGTTGGNTG
ATAC
BSK-2A3-A2 - reverse
TATCAACCAACACCTTTTCTGGGGTCTGATGAGCGTCGGCATCGGGCGCCTTAACCC
GGCGTTCGGTTCATCCCGCAGCGCCAGTTCTGCTTACCAAAAGTGGCCCACTAGGCA
CTCGCATTCCACGCCCCGCTCCACGCCAGCGAGCCGGGCTTCTTACCCATTTAAAGT
TTGAGAATAGGTTGAGATCGTTTCGGCCCCAAGACCTCTAATCATTCGCTTTACCGG
ATAAAACTGCGTCGCGGGGGTGCGTCGGGTCTGCGAGAGCGCCAGCTATCCTGAGGG
AAACTTCGGAGGGAACCAGCTACTANATGGTTCGATTAAGTCTTTCCCCCCTATACC
CAGGTCGGACGACCGATTTGCACGTNAGGACCGCTACGGACCTCCCCANAGTTCCTN
TGGNTTNGCCCTGCCAGGCTANTNACCATNTTTGGGNCTAAACGNGCGCTCGGCCGG
AATTCNCCGANCTGANGGCTCCNGAATNNNNCCCCCATCCCAGC
BSK-2A3-B3 - forward
GCCCCCCCTAACCGGCTTTTTGCCCAAACGGGCCATTATCGAAGAATTCACAAAAAA
CAATAGCCTCATCATCCCCACATCATAGCCACCATCACCCTCCTTAACCTCTACTTC
TACCTACGCCTAATCTACTCCACCTCAATCACACTACTCCCCATATCTAACAACGTA
AAAATAAAATGACAGTTTGAACATACAAAACCCACCCCATTCCTCCCCACACTCATC
CCCCTTACCACGCTACTCCTACCTATCTCCCCTTTTAT
BSK-2A3-B3 - reverse
ATAAAAGGGGAGATAGGTAGGAGTAGCGTGGTAAGGGCGATGAGTGTGGGCAGGAAT
GGGGTGGCTTTTGTATGTTCAAACTGTCATTTTATTTTTACGTTGTTAGATATGGGG
AGTAGTCTGATTGAGGTGGAGTAGATTAGGCGTAGGTAGAAGTAGAGGTTAAGGAGG
CTGATGGTGGCTATGATGTGGGGATGATGAGGCTATTGNTTTTTGTGAATTNTTNNA
TAATGCCCCGTTTGGGCAAAAAGCCGGNTANCGGGGGCCG
BSK-2E14-D4 - forward
CGGGACTTTACCCCATCATTTGCAGAACCAGTATCAATATTCGTAAGGTAACTGCTC
TTAAAACTCANAATCATCCTAACTGGATGTAAAAACTTTTTCCCAGAAAATGTTGGC
GTGCACTCACAAAACCCTCTTACTTCATTTTCTCCATATAATGACTCTATGGGGGGA
GGGCGCCAGGTGTCCTCATTCTCATTTGAAATTTGAATTCCAATCTTGTTAGAATGT
AGCCCAACTCCTTTCCTTTCTCAGGAAAGTGGCGACAGTTCTCAGGTCTGCCTCCAC
ATTACCATCACCTGGGGGATCTAAAACTACTCAGGCCTGGGTTCCACCTTCAGCCAA
CGAAATCTGAATCTTTANGGGTGGCTGATTTCGCTGTTCTGTAAATGAAGTTTTAAT
GGTCACAGCCCGTCTGACCGTTTGCATA
BSK-2E14-D4 - reverse
TATGCAAACGGTCAGACGTGGCTGTGACCATTAAAACTTCATTTACAGAACAGCGAT
ATCAGCCACCCCTAAAGATTCAGATTTCGTTGGCTGAAGGTGGAACCCAGGCCTGAG
TAGTTTTAGATCCCCAGGTGATGGTAATGTGGAGGCAGACCTGAGAACTGTCGGCCA
CTTTCCTGAGAAAGGAAAGGAGTTGGGCTACATTCTAACAAGATTGGAATTCAAATT
TCAAATGAGAATGAGCACACCTGGCCCCCTCCCCCCATAGAGTCATTATATGGAGAA
AATGAAGTAAGAGGGTTTTGTGAGTGCACCCCAACATTTTNTGGGAAAAAGGTTTTA
CATCCAGTTAGGATGATTCTGAGTTTTAAGANCANTTACCTTACCAATATTGATACT
GGGTCTGCNAANGATGCGGGAAAATCCCCCGGNATTCACTGAGCGCCNGGCGGTACC
ATTACAANTGGNTNGGGGGNAAAAATAATAATNACCGGCAGGCATGTTAAGNCCAAA
TTTTNGAAATTCTTNCACTGGGGGGCGGTTNACTTCTTTTNAAGGGCCAATNNCCCN
TATGAGGNGNNTANAANTNCTGGCCNNGNTTTCANNNNNNACNGGAAAACTGGGGTT
CCCAATTAANTNNTTTNNNNNANNCCCTTTTCCCTGGGNANANNAAAAAGGCCNNNC
CANTNCCNTTCNANANTNNCNNCTANNGGGAANGGNNCCCCNTNNNGNNCNTAANCN
GGGGGGGGGGGTNCCC
BSK-2F6-D3 - forward
CAACAACACATCATCAGTAGGGTAAAACTAACCTCTCTCACGACGGTCTAAACCCAG
CTCACGTTCCCTATTAGTGGGTGAACAATCCAACGCTTGGTGAATTCTGCTTCACAA
TGATAGGAAGAGCCGACATCGAAGGATCAAAAAGCCGACGTCGCTATGAACGCTTGG
CCGCCACAAGCCAGTTATCCCTTGTGGTAACTTTTCTGACACCTCCTGCTTAAAACC
CAAAAGGTCAGAAGGATCGTGAGGCCCCGCTTTCATGGGCAGTAGGCAGATTCGTCC
BSK-2F6-D3 - reverse
GGACGAATCTGCCTACTGCCCATGAAAGCGGGGCCTCACGATCCTTCTGACCTTTTG
GCTTTTAAGCAGGAGGTGTCAGAAAAGTTACCACAGGGATAACTGGCTTGTGGCGGC
CAAGCGTTCATAGCGACGTCCCTTTTTGATCCTTCGATGTCGGCTCTTCCTATCATT
GTGAAGCAGAATTCACCAAGCGTTGGATTGTTCACCCACTAATAGGGAACGTGAGCT
GGGTTTAGACCGTCGTGAGACAGGTTAGTTTTACCCTACTGATGATGTGTTGTTG
BSK-2G3-A3 - forward
TTTTTTTTTTTTTTTTGAGACAGAGTCTCACTCTGTCACCCAGGCTGGGGTGCAATG
GCATGCTCTCAGCTCACTGCAACCTCTGCCTCCTGGGTTCAAGCGATTCTCCTGCCT
CAACCTCCCGAGTGACTGGGATTACAGGCATGCACCACCATACCCAGCTAATTTTTG
TATTTTTAGTANAGATGGGGTTTCACCATGTTGGTGAGGCTGATCTTAAACTCCTGA
CCTCAGGTGATCTGCCTGCCTTGGCTTCCCAAAGCACTGGGATTACAGGTGTGAGCC
ACCATGCCTGGCCTATTTTGAAAAAAATTTGAAGTCAAAATAATAGTACAATAAATA
CCTGTGAACCCTTCAGCTATATTTACCAATTGTTAATATTTTACCATGTTTGCTTCA
TCTCTCTACATATGTATTCATATGTAATTTTTTTTATTTTTGCCAAAACATTTGAAA
ATTAAACATCTGGATACTTTGCCATTAAANCCTTCAACATGAATCTCCTAAAAAATA
ANAACAGCTTNTATCCCCATACCNTTATCACATCCCAGAAAATTACCCCCNTACATT
NAATGACTACTNCNGCCCTATCAAATTNTTTGATATCCAAACTTTCTTTGGGGGGNT
TTTTTCCCNNCCCNAATCANTCANGNCCNCCATTGNNTTTAATGGGNAGNTNCTNNA
NNNAAAATATCCNCCTTTTTTCTTTNTGANTTGNCTTTTAAAAAACCANTNANANCC
TGGGNGNTNCCAACNGNNTTNTGG
BSK-2G3-A3 - reverse
CGGCTTTGTGGAAGACAGTTTTTCCGTGAACAGGGGTTGGAGGTGGTGGTGGGAGGG
ATGGTTTTGGGATGAAACTGTTCCACCTCAGATCATTAGGTATTAGATTCTCATAAA
GAGCACACAGCCTANATCCCTCACATGTGCAGTTCCTATGAGAATCTAATGCCACAG
TTCACCCGCCACTCACCGCTGTGAGTGGCCTTGTTCCTAACAGACCATGGACCANTA
CTGGCCCGTGGCCCANGGGTTAGGGACCCCTGATCTAACACATANATCTAATGAAGA
AACAGGTTCCATGTGTTAAAAATCTGTGGTTGAAACTGACATTATATTCCTCCTGAT
TTGATACCATGGGGAATACANAACATGACCTATGTGGTACTCCTACCAAAAACGTTT
NACTTGAATCTAACCATGANCAAACATCCANACAANTACAGCTTGTGAGAGCCTCNC
ANGCTGNTACTTGGATTTTTTAAAANNGNNNTGNNTNAAAGGAAAAAAGGNNGGGNT
ANTNTNNATTAANGAACTTNCNNTNAANGCNNGNGNGGNCTTGNTGAANNTNGATGG
GAAAAAANCNCCCC
BSK-2G3-C5 - forward
AGCACACTGGCGGCCGTTACTAGTGGATCCGAGCTCGGTACCAAGCTTGATGCATAG
CTTGAGTATTCTATAGTGTCACCTAAATAGCTTGGCGTAATCATGGTCATAGCTGTT
TCCTGTGTGAAATTGTTATCCGCTCACAATTCCACACAACATACGAGCCGGAAGCAT
AAAGTGTAAAGCCTGGGGTGCCTAATGAGTGAGCTAACTCACATTAATTGCGTTGCG
CTCACTGCCCGCTTTCCANTCGGGAAACCTGTCNTGCCANCTGCATTAATNAATCNG
NCAACNCNCGGGGAGAGGCGGTTTNCNTATTNGGCGCTCTTNCNCTTCTCNNTCACT
GACTCNTGNCTCNGNCNNTNNNNTNNNGNNANCGGATANNTNACTTCAAANGCGGNA
TACGNTATCCANAATNANGGGATAACNCNNNAAAAAACAT
BSK-2G3-C5- reverse
AGCACACTGGCGGCCGTTACTAGTGGATCCGAGCTCGGTACCAAGCTTGATGCATAG
CTTGAGTATTCTATAGTGTCACCTAAATAGCTTGGCGTAATCATGGTCATAGCTGTT
TCCTGTGTGAAATTGTTATCCGCTCACAATTCCACACAACATACGAGCCGGAAGCAT
AAAGTGTAAAGCCTGGGGTGCCTAATGAGTGAGCTAACTCACATTAATTGCGTTGCG
CTCACTGCCCGCTTTCCANTCGGGAAACCTGTCNTGCCANCTGCATTAATNAATCNG
NCAACNCNCGGGGAGAGGCGGTTTNCNTATTNGGCGCTCTTNCNCTTCTC
BSK-2K15-A1 - forward
CTAAACTTAGGGCAACCCCAAGCGCTTGAACCTATACCACCCCACTTTCCTGAGCTC
TGTAAAGAGCATGAAGTTTTCCCACTGACCCCATACACTGAGGTGCCATCACACTGC
ACATTTCCTTCCGGAGAACAAGCACGTACTCAGGTGGAGATAGAACTGTCTTTTTAC
TTAATAGAAAATGATGTGGCAGCTTTAAGAGGAGCGCGTCGGTCTGGGGCTGGTGGC
TTGGGTCACGTGACACCGGTGGTCTCGTTTGCGCCTCTTGATGTCGCGGCGGCGCCC
TGAGGACGGATTGGGCAAGGCTGGTCCCTGTGTGATGAGACATCACCCTCCCAGGAG
CAAGGCGGAAGTCTGGAGGACCTTANGGGCGGANGCGGGAGAAGCNAACTCCGATGA
ATGGTCTCGGCAGGCTCTTCGGGAAAGGGTGAGCCANGGTGGGACTGGCCAGCCAGG
AAGCCTGCTGGTGCAGGGGAAANAAGANANCCCGCGAGATTNGGCCGGACCCTTCCC
GGCNGGGGAAGAAAATCAGGAGAACAGGCTGACTGGAAAANCCCGCGGNCCATGGNG
GACAAGGGTATTNCCGGGGCCAAAAGGNCACCATGTNGGNGGAATTCCNCTGACNCC
GGCGTTACATTAACANTNGGNTGGGGGNAAAANAAAATAACCGGNNGGCCTGTNAGC
CAAATTCACNNCTGGNGGGCGTNTTTGGNTCCACNNGNCCNACTTGANNNNANTTNN
GNTTTTTTNGGNNCCNAAAANTGGGGA
BSK-2K15-A1 - reverse
CCGACATGGTGTGCCTTTTGGCACCGGCGATGAGCCTTGCTCCGCCATCGGCCGCCG
GGGTTTTCCAGTCAGCCTGTCTCCTGATTCTCTTCCCCTGCCCGGCGCAGCGGTCCG
GCCGAATCTCGCCGGGGTCTCCTCTTCCCCTGCACCAGCCAGCGCCTCCTGGCTGGC
CAGTCCCACCCTGGCTCACCCTTCCCGAAGAGCCTGCCGAGACCACTCATCGCGAGC
TCGCCTCTCCCGCCTCCGCCCCTCAGCGTCCTCCAGACTTCCGCCTTGCTCCTGGGA
GGGTGATGTCTCATCACACAGGGACCAGCCTTGCCCAATCCGTCCTCAGGGCGCCGC
CGGACATCAAGAGGCGCAAACNANACACCGGTGTCACGTGAACCAAGCCACCANCCC
ANAACGANCGCTTCTCTTAAAGCTGGCCCATTATTTTTATTAANTAAAAANACAGNT
NTATTTTCACTGANTACNTGCTTGTTNTCCGAAGGAAAGGGC
BSK-2K15-C1 - forward
GATGGCTTATATAACCAGAAGCCAAATATTTGTGTTCCAAAAATTATTTTACTTAGA
ACAATTCATTTAGATTCACTTCAATGTGAAGTATGTGAAAAGCTTAATTGCTGACCA
GAGTGAATTTTCCAACAATAAGAAATGCATGGCTGATTGGCTCAAATGATTCTATTC
TTCAGCCCTTACTGAAGTACTTAGTGCATACCACCTATGTAATTTTATTCCCCCCTT
ATAGAGATGGGGTTTCACCATGCTGCCCAGGCGGGTCTCAAACTCCTAGGTACAAGT
GATCCACCCACTTCGGCCCGCCAAAGGGCCGGGATTACTGGCATGAGCCACCAAGCC
CAGCCTGGTTATGTATTTATTCGGTATCATAGGGGCTACAGCACAAATCAAAACCAT
AGTATCAGTGACCTCCAATCTAATTCCCG
BSK-2K15-C1 - reverse
GGAATTAGATTGGAGGTCACTGATACTATGGTTTTGATTTGTGCTGTAGCCCCTATG
ATACCGAATAAATACATAACCAGGCTGGGCTTGGTGGCTCATGCCAGTAATCCCGGC
CCTTTGGCGGGCCGAAGTGGGTGGATCACTTCTACCTAGGAGTTTGAGACCCGCCTG
GGCAGCATGGTGAAACCCCATCTCTATAAGGGGGGAATAAAATTACATAGGTGGTAT
GCACTAAGTACTTCAGTAAGGGCTGAAGAATAGAATCATTTGAGCCAATCAGCCATG
CATTTCTTATTGTTGGAAAATTCACTCTGGTCAGCAATTAAGCTTTTCACATACTTC
ACATTGAAGTGAATCTAAATGAATTGTTCTAAGTAAAATAATTTTTGGAACACAAAT
ATTTGGCTTCTGGNTATATAANCCATC
BSK-2K15-D1- forward
GAATTGCTTGGACCTGGGAGGCATAGGTTGTGGTAAGCCGAGATTGCGCCATCGCAC
TCCAGCCTGGCCAACAAGAGTGAAACTCCGTCTCAAACAAACAAACAAAAAAGACAC
AAAAGTAAAGGACTTCTTGACCTCTGGTTGAAAGAGTAGCGCATGGGGGGTGTTTCT
GGCAAACAAACCTTCCCAACAACGTCAGAACTGTGTTCACAAATGCTAACCTGTCGG
CCTGGTTATAGAACATCCTCTTCCCTCAGGGGTATCTGGCAGAGGCAGGTACCCGTG
GAATGGTGCAGGTGGTGCCCATGCTCTAGTGTATGCCAAGAGTTCCTACTTTTACAA
AGTAGCCACTTTAAAAAAATGTTGGTACTGGCCAACATTCCTTTCATGCACCCAGGA
GGGCAGCAGGTACCTGGGATCCAAGGATGGATGGCCAGGGCAGGTGGCTGAAAAATG
GGGGTGGGTCAAGAAGGATGTANCTCCTGGGGTGGCGCCCAACAAAAAAAATTANGG
GTAGGGNGGGNGCTATGGNTGGAATGNTTATCCCCCCCAAACTNANNTTNAANGGAA
BSK-2L13-A2 - forward
TGGCCAATGCTCTCTCTGTGAAACTTCAAACTTCAAATGAGGCCCACCTTACATGGG
TCACCATGTGCATGGAAAGAATGTATTTACACTCAGGTACATTCTCGTGGGAAACTG
GAAACCAGCCGGCGGCATCTTGGTGTGACTGCATGCACAATGCATGCGTGTCCTTAA
AGCATTTAATGTTAATGTTTGTATGTGTGAATGCAAAGGAATTTTAATGATATCATG
GCCACATCGAGGTCACTAACCTTGGGAAGTAACATGATCACAAGAATTTTGTATGTG
CTGAGTGACTATTACAGTAACGATTGCAGTGTATAATTGAAGTAGTCCGGCATAATT
TCAAGGGCCCAGACTCCGTGGAAAGAGTTTCCTGACTGAGTCCACGTCCATTCACCA
AGGAAGGCAGGCAGTGGCCTTGCANAAATCCCTCACAATGATGNTGGGCATCCCATC
TACCTTGGTTTTTAGGGCTGGCATAATAATGCCNGNCTATTCANTTTTAAGACAGAT
ATATTTTACNNATAAACCCTGGNGGGGCANAAAANCCCCCTGGNTTCTAACTCTAAC
CTGGGCTCTTNCCTTACTGGGCCCTGGGGGGNTGNTCCTATTCNATNAAAAANCCNC
CANCNGACGGCTCNAGAATNNNNCNCCATCCAANCNAATTCA
BSK-2L13-A2 - reverse
TTCATAGGAATAGGGAACAAACACCACAGTGGCACANTNATGGGAAGGAGCCCAGGC
TAGGAGTTAGGAGACAGTGGCGGCTTCTCTGACACCACCAGGGCTCTCATCTGTAAA
ATGATATCTGTCTTAAAACTGAATGAGACCTGGCATTATTATGGCCAGCCCTGAAAA
CCAAGGTAGATGGGATGCACAACATCATTGTGAGGGATTTCTGCAAGGCCACTGCCT
GCCTTCCTTGGTGAATGGACGTGGACTCAGTCAGGAAACTCTTTCCACGGAGTCTGG
GCCCTTGAAATTATGCCGGACTACTTCAATTATACACTGCAATCGTTACTGTAATAG
TCACTCAGCACATACAAAATTCTTGGGATCATGTTACTTCCAAGGGTAGTGACCTCN
ATGTGGCCATGATATCATTAAAATTCCTTTGCNTTCCCCCTNCCAACATTAACATTA
AATGCTTTAAGGACCCCCTGCNTTTGGCATGCANCACCCAANANGCCGCCCCTGGNT
TCCATTTCCCCCANAAGGACCTGAANGGAAATACTTCTTTCCTCCCATGGGGACCCT
GNANGGGGGCCCANTTNAANTTGAANTTNCAAAAAACATTGGCNCGGAATCCNCTGA
CCCCGGGNGTTNCTTACAANTGGGNNGGGGGNAAAANAAAANAACCGGCNGGCCTGN
NANNCCAATTTNNAAAANCTNNACTGGGGGCGTTG
BSK-2L13-B5 - forward
CAAAGATAAGACCCCCGAAACCAGACGAGCTACCTAAGAACAGCTAAAAGAGCACAC
CCGTCTATGTAGCAAAATAGTGGGAAGATTTATAGGTAGAGGCGACAAACCTACCGA
GCCTGGTGATAGCTGGTTGTCCAAGATAGAATCTTAGTTCAACTTTAAATTTGCCCA
CAGAACCCTCTAAATCCCCTTGTAAATTTAACTGTTAGTCCAAAGAGGAACAGCTCT
TTGGACACTAGGAAAAAACCTTGTAGAGAGAGTAAAAAATTTAACACCCATAGTAGG
CCTAAAAGCAGCCACCAATTAAGAAAGCGTTCAAGCTCAACACCCACTACCTAAAAA
ATCCCAAACATATAACTGAACTCCTCACACCCAATTGGACCAATCTATCACCCTATA
GAAAAACTAATGGTAGTATAAAGTAACATGAAAACATTCTTCTNCGCATAAGCCTGC
GTCAGATTAAAACCTTGAACTGACATTAACAGCCCAATATCTACAATCAACCACAAG
TCATTATTACCCTACTGNNNANCCACCANGCATGCTCNTAAGGAAAGGTTAAAAAAG
TAAAAGGACTCGGNAATNTTACCCGCTGTTTCCAAAAAATTACCTTACNTCNCCNTN
TTAAGGCCCCCTGNCCATGACCATGTTTAAGGCCGNGGNCCCTACCGGCAAAGGGGG
ANAATACTTTTCTTANTAGGGCCCNTTAANGNTCCCCANGGTNANTTTTTTATTTTA
CANNNAATNACTNCCNGAAAGGGGNTNAACNNAANAAAAAAACNT
BSK-2L13-B5 - reverse
GGTTGGGTTCTGCTCCGAGGTCGCCCCAACCGAAATTTTTAATGCAGGTTTGGTAGT
TTAGGACCTGTGGGTTTGTTAGGTACTGTTTGCATTAATAAATTAAAGCCCCATAGG
GTCTTCTCGTCTTGCTGTGTCATGCCCGCCTCTTCACGGGCAGGTCAATTTCACTGG
TTAAAAGTAAGAGACAGCTGAACCCTCGTGGAGCCATTCATACAGGTCCCTAATTAA
GGAACAAGTGATTATGCTACCTTTGCACGGTTAGGGTACCGCGGCCGTTAAACATGT
GTCACTGGGCAGGCGGNGCCTCTAATACTGGNGATGCTAGAGGNGATGTTTTTGGTA
AACAGGCGGGGNAANATTGCCGAGNTCCTTTTACTTTTTTTAACCTTTNCTTATNAA
CATGCCTGTGTTGGGTTGACAGNGAGGGNAATAATGACTNGTGGNTGATGNAAAAAT
TGGGCTGTNATTG
BSK-1B6-A3 - forward
GGGTACCAAATTTCTTTATTTGAAGGAATGGTACAAATCAAAGAACTTAAGTGGATG
TTTTGGTACAACTTATAGAAAAGGTAAAGGAAACCCCAACATGCATGCACTGCCTTG
GTGACCAGGGAAGTCACCCCACGGCTATGGGGAAATTAGCCCGAGGCTTANCTTTCA
TTATCACTGTCTCCCAGGGTGTGCTTGTCAAAGAGATATTCCGCCAAGCCAGATTCG
GGCGCTCCCATCTTGCGCAAGTTGGTCACGTGGTCACCCAATTCTTTGATGGCTTTC
ACCTGCTCATTCAGGTAATGTGTCTCAATGAAGTCACACAAATGGGGGTCATTTTTG
TCAAGTGGCCAGTTTGTGCAGTTCCAGTAGTGACTGATTCACATTTTTTTCCAAATG
TAATGCACACTCCATTGCATTCACCCGNTCTCCCANTCATNACAANCTGGNTTTTGA
TATCCTGAANGAAAAATCGGCCCCTCNTTGGTCTTGANCTTCATCANTTTNTAACAT
GTTCCTTTCCTATGAAATTGGGGAAAAAAGTATTTGCAAATTNTNAAANCCCATTAT
NNCGGNCAAANANTAANAAATGGNCAGGNAACCTAGGNGGAATCCACTTANCCCGGC
NTCCATACCANTGGGCNGNNGCAAAAAAAAATAACCGGCNGGCCTTNAACCAATTCN
CCCTGGNGCCNTCTNNGGATCCACCGGCCAAC
BSK-1B6-A3 - reverse
CCTACGTTTACCTGTCCATGTCTTACTACTTTGACCGCGATGATGTGGCTTTGAAGA
ACTTTGCCAAATACTTTCTTCACCAATCTCATGAGGAGAGGGAACATGCTGAGAAAC
TGATGAAGCTGCAGAACCAACGAGGTGGCCGAATCTTCCTTCAGGATATCAAGAAAC
CAGACTGTGATGACTGGGAGAGCGGGCTGAATGCAATGGAGTGTGCATTACATTTGG
AAAAAAATGTGAATCAGTCACTACTGGAACTGCACAAACTGGCCACTGACAAAAATG
ACCCCCATTTGTGTGACTTCATTGAGACACATTACCTGAATGAGCAGGTGAAAGCCA
TCAAAGAATTGGGTGACCACGTGACCAACTTGCGCAAGATGGGAGCGCCCGAATCTG
GCTTGGCGCAATATCTCTTTGACAAGCACACCCTGGGAGACAGTGATAATGAAAGCT
AAGCCTCGGCTAATTTCCCATACCGTGGGGTGACTTCCTTGGCCCAAGGCAGTGCAT
GCATGTTGGGGTTCCTTACCTTTCTATAATTGGACCAAAACATCCCTTAAGTCTTTG
ATTGNCCATTCTTNAATAAAAAATTTGGACCC
BSK-1C1-2 - forward
GGCTAACAATCTCCAGAAGGTTCATTCAGGCCCATGCAAATCAGTGCCGGAGCCTAG
AGACAGCACAGCCTAGAGCTAGAGGTCAGGCAGGGCTGAGCTGAGTCACCCACTATT
CAGACCTCCCTCTTAGAGCCTCAGCTACTGGATGGTGGTCATTAAGTTATCATTTAA
ACTACAGACGCAGGCTGGGTACGGTGACTCAACCCTATAGCCCCAGCACTTTGGGAG
GCCAAGATGGGAGGATCACTTGAGGTCGGGAGTTCAACACCAGCCTGGCCAACATGA
TGAAACCCCGTCTCTACTAAAAATACAAAAACTAGCTGGGTGTGGGGCGNGCACATC
TTTAATCCCAGCTTCTCANGANGCTGANGCAGGAGGATCACTTAAACCCANNAAGTG
GANGCTGCANGGAGCCCANATCGCACACTTNACTCCACCTGGGTGACAGAATGAGAC
TCATNTTCNAANGAAACCANCNNCCNNTNNCTCNNTGCCNNNNGTANCTNTTACCNA
TCCTTNCCAAGGACCCCACCTTACCATACTTGNTACTAGGNGGCNCCTGAATTTCCN
AAANCNNTCTTAAGGGGGCCTCAAGTTTANNGGCCNTTNCTT
BSK-1C1-2 - reverse
GTGATCTCGGCTCACTGCAACCTCTGCCTCCTGGGTTCAAGCGATTCTTGTGCCTCA
ACCTCCCGAGTAGCTGGCATTACAGGAGCCCGCCCACCATGCCTAGCTAATTTTTGT
ATTTTTAGTAGAGACAGGGTTTCACCATGTTGGCCAGGTTGGTCTGGAACTCCTGAC
CTTGTGATCTGCCTGCCTTCGCCTCCCAAAGTGCTGGAATTACAGGTGTGAGTCACC
GCGCCCAAGTATAGGCCACTTTTAAGAATTACTCANAGTTAGCTTATAAGAGGCGAA
TCAGTGGAGTCCTCCAGTTTGGTTCACACATAATTATTAGGTTGAACCATATAAAGT
TACTGTTTTTGGTCCTGTGAATATTAATATTTATATATGGGTCCAATCTGATATGTT
CCANAAAATACACACTTAANTAAAGNTTGGAAAACCAAATCATANACTTACATACTG
NAAGGCGGGGTATTTGAAACTGGGATGGAAAATCAATTTAATGAGNTATGANCTGCN
TTAAAAAAATGGGANAANATCANANTTGGTGGNANNATTGNAAAAAACCAAATTGCT
GGGGAAGATTGGCATTTNANTNTTNTNNCNCCCNGNGGGGGGGGNNGGGGGNACNAA
ANGNNANAAAGAA
BSK-1D8-2A - forward
CAGTTCCACCCGGGCAGGCAGTCGGGGGATGAGGGGCCGTCTAGCGTCCGCACGCGT
TCACTCCCAAGGAAGGTGTGTGGGCACGGTGAGGAGTGGGAAGAAACAGAATAGGAA
AGTGGCCTGACACGGGGATTCTAAGCAGGTCAAAAGTTATGTTGCCTTGTAGGATGG
GAAGAGAAAAATAAAAATTTGATTTGTTGTTTAAAGTGATGGGGTTCTGGGGATATT
TTTCCTTTTTAATTTTAATATCTTTGGATTAANTTTTTTTTCTCTTTTTTTCAACGG
AGTCTCACTCTCTCACCCTGGGTGGAGTGCANNGGNACNATCTNGGNTNANTGNAAC
CTNCACTTTCTCGGNTCAAGNGANTCTTCTGGCTNANCCTCCNAANANTNGGAATAC
AGGCCCTGCNCCANGCCTGGNTAATTTTGGNTTTTAANAAANCGGAATTCCNCNNNC
TNNNNGCTNNAGA
BSK-1D8-2A - reverse
CTTTACTAAAAATACAAAAATTAGCCAGGCATGGTGGCAGGTGCCTGTAATCCCAGC
TATTCGGGAGGCTGAGGCAGGAGAATCACTTGAACCCAGGAAGTGGAGGTTGCAGTG
AGCCGAGATCGTACCACTGCACTCCACCCAGGGTGACAGAGTGAGACTCCGTTGAAA
AAAAGAGAAAAAAAAATTAATACAAAGATATTAAAATTAAAAAGGAAAAATATCCCC
AGAACCCCATCACTTAAACAACAAATCAAATTTTTATTTTTCTCTTCCCATCCNACA
AGGCAACATAACTCTTACCTGCTTANAATCCCCGTGTCANGCCACTTTCCTATTCTG
TTTCTTNCCACTCCTCANCGNGCCCACACACCTTTCTTGGGAGTGAACGCGTCCCGA
CCTANACGGCCCTCATCCCCGACTGGCTGCCCGGGTGGAACTGGGGAATTCCACTTA
ACGCCGGCGNTCCATTACCAANTGATCTTGGGGCAAAAATAATAATAACCGGCNGGC
CTGTNAAGCCCAANTNTNNAAANTTCTTNNACTTGGNGGCGNTNAGCAGCNTTTNAC
GGCCAATNNCCTATNNGGGNNGNNTANAATNNTGGCCGNGTTTAAANNNNNGANGGG
AAACCNGGNNTNCCANTAANNCTTGNNAAATCCCTTTTCC
BSK-1D9-1B - forward
CAGTTCCACCCGGGCAGGCAGTCGGGGGATGAGGGGCCGTCTAGCGTCCGCACCCGT
TCACTCCCAAGGAAGGTGTGTGGGCACGGTGAGGAGTGGGAAGAAACANAATANGAA
AGTGGCCTGACACGGGGATTCTAAGCANGTCANANNTATGNNGCTNG
BSK-1D9-1B - reverse
CTTTACTAAAAATACAAAAATTAGCCAGGCATGGTGGCAGGTGCCTGTAATCCCAGC
TATTCGGGAGGCTGAGGCAGGAGAATCACTTGAACCCAGGAACTGGAGGTTGCAGTG
AGCCGAGATCGTACCACTGCACTCCACCCAGGGTGACAGAGTGAGACTCCGTTGAAA
AAAAGAGAAAAAAAAATTAATACAAAGATATTAAAATTAAAAAGGAAAAATATCCCC
AGAACCCCATCACTTAAACAACAAATCAAATTTTTATTTTTCTCTTCCCATCCTACA
AGGCAACATAACTCTGACCTGCTTAGAATCCCCGTGTCAGGCCACTTTCCTATTCTG
TTTCTTCCCACTCCTCACCGTGCCCACACACCTTCTTGGGAGTGAACGCGTGCGGAC
GCTAGACGGNCCCTCATCCCCCGACTGCCTGCCCGGGTGGAACT
BSK-1K9-A4 - forward
CTGCGTCAGATTAAAACACTGAACTGACAATTAACAGCCCAATATCTACAATCAACC
AACAAGTCATTATTACCCTCACTGTCAACCCAACACAGGCATGCTCATAAGGAAAGG
TTAAAAAAAGTAAAAGGAACTCGGCAAATCTTACCCCGCCTGTTTACCAAAAACATC
ACCTCTAGCATCACCAGTATTAGAGGCACCGCCTGCCCAGTGACACATGTTTAACGG
CCGCGGTACCCTAACCGTGCAAAGGTAGCATAATC
BSK-1K9-A4 - reverse
GATTATGCTACCTTTGCACGGTTAGGGTACCGCGGCCGTTAAACATGTGTCACTGGG
CAGGCGGTGCCTCTAATACTGGTGATGCTAGAGGTGATGTTTTTGGTAAACAGGCGG
GGTAAGATTTGCCGAGTTCCTTTTACTTTTTTTAACCTTTCCTTATGAGCATGCCTG
TGTTGGGTTGACAGTGAGGGTAATAATGACTTGTTGGTTGATTGTAGATATTGGGCT
GTTAATTGTCAGTTCANTGTTTTAATCTGACGCA
BSK-1L3-B5 - forward
GGGGGNNGGGTTTTTTTTAAAAAAANANTGNACATTTATTTATTACTGNCCCTATTT
ATTAAANNGACTTTTTNTNAACCAAGGGCTTTTACTTTTTNTTCTTGCCTTTANGGG
CTTCAGGGGGTTTTCCCTTAANTACAACCAANTNTTTTTTTNAANCNAAAANTTTNN
CCACCTNCNNANCAACCTCNTTNTTGNCTGCCTTTTGTGCTTTNAANTNTCGGACAG
TTTGNAAGTCCTCAAANACCTNNAGGNNGAAATAANATTTNNCCCANCNANCCCATT
NNTGGGTATACANCNGAAGGAATATAAATNACTNTTTTANAAAAACACNNCCCATNT
TTNTTNCTNNNNNNTNTTTANAACANCCCCNANATNAAATNAACCNAATNNCCNTNN
NNGNGGATTNCNCCNNNCTNNCGGCTCAAAAA
BSK-1L3-B5 - reverse
CACTGATGGGCATTTGGGTTGATTTCATGTCGTGGCTGTTGTGAATAGTGCTGCAGT
GAACATACATGTGCATGTGTCTTTATGATAGAGTGATTTATAATCCTTCAGGTGTAT
ACCCAGTAATGGGATTGCTGGGTCAAATGTTATTTCTGCCTCTAGGTCTTTGAGGAC
TTGCAAACTGTCCGAGAACTGAAAGCACAAAAGGCAGACAAGAACGAGGTTGCTGCG
GAGGTGGCGAAACTCTTGGATCTAAAGAAACAGTTGGCTGTAGCTGAGGGGAAACCC
CCTGAAGCCCCTAAAGGCAAGAAGAAAAAGTAAAAGACCTTGGCTCATAGAAAGTCA
CTTTAATAGATAGGGACAGTAATAAATAAATGTACAATCTCTATATTAAAAAAA
BSK-1L3-C1 - forward
CCTTTCTATTAGCTCTTAGTAAGATTACACATGCAAGCATCCCCATTCCAGTGAGTT
CACCCTCTAAATCACCACGATCAAAAGGGACAAGCATCAAGCACGCAGCAATGCAGC
TCAAAACGCTTAGCCTAGCCACACCCCCACGGGAAACAGCAGTGATTAACCTTTACC
AATAAACGAAAGTTTAACTAAGCTATACTAACCCCAGGGTTGCTCAATTTCGTGCCA
GCCACCGCGGTCACACGATTAACCCAAGTCAATAGAAACCGGCGTAAAGAGTGTTTT
AGATCACCCCCTCCCCAATAAAGCTAAAACTCACCTGAGTTGTAAAAAACTCCANTT
CACACAAAATAGACTACNAAAGTGGCTTTAACATATCTTAACACACAATAGCTAANA
CCCAAACTGGGATTAGCGGAATCCCCG
BSK-1L3-C1 - reverse
CGGATTCCGCTAATCCCAGTTTGGGTCTTAGCTATTGTGTGTTCAGATATGTTAAAG
CCACTTTCGTAGTCTATTTTGTGTCAACTGGAGTTTTTTACAACTCAGGTGAGTTTT
AGCTTTATTGGGGAGGGGGTGATCTAAAACACTCTTTACGCCGGTTTCTATTGACTT
GGGTTAATCGTGTGACCGCGCTGGCTGGCACGAAATTGACCAACCCTGGGGTTAGTA
TAGCTTANTTAAACTTTCGTTTATTGCTAAAGGGGTAATCACTGCTGTTTCCCNTGG
GGGTGTGGCTANGCTAAACGTTTTGAGCTGCATTGCTGCGNGCTTGATGCTTGTCCC
TTTTTATCATGGNGATTTATAAGGGGAACTCCCTCNAATGGGGATGCTCCNTGTGTN
ATCTTACTANNANCTNTANAAAGGGGGGNTTNNNCTNANCGCCGGNNCTCCATAACA
ANAGGNNNGGNGGNNAAAAAATAATAANCGNCNGGNCATNTTAGCCNAATATTCNGA
NATC
BSK-1L3-A3 - forward
CAAAAAGATAATTAACCTTTATTATTCATTAAAAATGAGCTTTCTAAAATATTAGTA
AATTTCATTTTAAGCTCTGTCTTGAAGTGCTGATACCACTGAAGTAACATTTTTCTT
CTTTCAATTTTTTCTTGTAAAATTATAGTTTTCTCTTTTTCTAAAACAGCAGGGAGT
TCCTTCCAGTTCTTGATAAAGATAAAGGGAGCACCCATGCACTTGAGTAACTGCAGA
GGAGCACCCGTGGTGCACAGATGTATTCCCACACTTGCCACCTGTCATCACGTCTTC
CACCACAGGAATGGAGCCATANGAGCAAGCCTCATANATTCNATAGCATTCTCTGNT
TACTCCGACCAGGCACAATGTGAGATCACTCTGAANCAAGGCATCTTGGTAATTCTT
AAACTTTCATTTGTTTCTGAGGCTGCCANNGNTNTNTTNCTGAACCCACAAACTTAT
NNNTCCATCTTTTTTAAAANGTTCATTATGCCNGCTGGATNAANTTTNNAAATNNNT
CCTAANAANNACNTAATATCGCTT
BSK-1L3-A3 - reverse
GCCCCCGCGCGGGAGAGACGCGGCCGAGAACAGTCCACTTTGGAAAGTGAAGAATGG
AATCCTTGGGAAGGAGATGAAAAAAATGAGCAACAACACAGATTTAAAACTAGCCTT
CAAATATTAGATAAATCCACGAAAGGAAAAACAGATCTCAGTGTACAAATCTGGGGC
AAAGCTGCCATTGGCTTGTATCTCTGGGAGCATATTTTTGAAGGCTTACTTGATCCC
AGCGATGTGACTGCTCAATGGAGAGAAGGAAAGTCAATCGTAGGAAGAACACAGTAC
AGCTTCATCACTGGTCCAGCTGTAATACCAGGGTACTTCTCCGTTCATGTGAATAAT
GTGGTACTCATTTTAAATGGAAGAGAAAAAGCAAAGATCTTTTATGCCACCCANTGG
TTACTTTATGCCAAAATTTAATGCAAATTCAAAAACTNCACATCTTGCTTGTTGGTT
TGCTCGGAAATGAACATTGTGATAATGAGTGGATAAACCCATTCTTAAAAGAAATGG
AGGCTTCGTGGACCTGNTTTTCATAATATATACACCCCTGGATAATGACTGGATGTT
TTTANTGGCCTTAGGAGTAGCACATCCGGAATTTCTTGGGNGAAGCAANTGGCAATG
TTCTNATAAAGGCCTTTTATTAATTTTTAGAACNATTTTAAAATTNTCCNACGGCCT
ATAACTTTTAAAAAAAGGGACCAAACTTTTGGGTTACANAAAACTGCNCTNGGAAAA
ANAAGTTAAAATTCCAAA
1M13-A4 - forward
GAAAGTTTAGAAACTTTAAAACAATAATAATGACGGTGATAGTGATAATAATTGCTA
ATGCTTTCAGATCACATATGTGTTAGGCGCTGTTTTTTGTTGTTGTTGTTATTGTTG
AGGCAGTCTCACTCTGTTGGCCAGGCTGGAGTGCAGTGGTGCTTTGCCTCCTGGGTT
CAAGGGATTCTCCTGCCTCANCCTCCTGAGTAGCTGGGATTACAGGCATGCGCCACC
ACGTCGGGCTAATTTTTGCATTTTTAGTGGAGACGGGGTTTCATCATGTTGGCCAGG
CTGGTCTCGAACTCACGACGTCNAGTGATCCACCTGCCTCGGCCTCCCAAAGTGTTG
GGATTACAAGGCGGTGAGCCACCATGCCCACCCGCACTGNNTTAAATGCTTTACATA
TATTATCTCATTTAATCCTCNNAAACCTTACAATATANANACTACNATTATTTCCCT
TTATATTTATNGNNCTCTTAGGCTCANAAAAGGGAACTAACTTCTTGGTNCATGGNN
GGGGNNGGAATNAAANCCANGNNANCCGCTCCCNAAANTNCNTTCNNTGCCNNNCTN
ACTGGGCCNTCTTTNAAGCGGGGCC
1M13-A4 - reverse
TTCATGGGGAATAATTGCAATCCCCGATCCCCATCACGAATGGGGTTCAACGGGTAC
CCGCGCCTGCCGCCGTAGGGTAGGCACACGCTGAGCCAGTCAGTGTAGCGCGCGTGC
AGCCCCGGACATCTAAGGGCATCACAGACCTGTTATTGCTCAATCTCGGGTGGCTGA
ACGCCACTTGTCCCTCTAAGAAGTTGGGGGACGCCGACCGCTCGGGGGTCGCGTAAC
TAGTTAGCATGCCAGAGTCTCGTTCGTTATCGGAATTAACCAGACAAATCGCTCCAC
CAACTAAGAACGGCCATGCACCACCACCCACGGAATCGAGAAAGAGCTATCAATCTG
TCAATCCTGTCCGTGTCCGGCCCGGGTGAGGCAGTGAGCTGAGATTGCGCCACTGCA
CTCCAACCTGGGCGACAGAACGAGACCCCATCTCAAAAAAAAAGGGGGGGGTGGACA
GGGGGCAAGTGGAGTCTGGCTGCCAAAACTACTTGTTGATGGTGGGGAAAAAAAAAT
GGGTGTCTCCTCCCTTGTCACTGGGAAGGNTTTGGTTCTCTTTCATCTTCATCCTCT
ATAGGGCCTTTATTCTTCCCCAATCTGAAATATTTCGNGNGTTTTACTTNCCCACAT
CCTTCAAAAATATTTGAGGTTGATAAAANTAACTTCCGGGTTGGACCCNGGNTAATC
TTTGGGTNTTTGGNTTACCAAAAAAAGGGTCNCATTAACCCNTTTTGATT
BSK-2A11-A2 - reverse
CTCAGCCCTGAGAAAGGAGACATGTAACAAGAGTAACATGTGTGAAAGCAGCAAAGA
GGCACTGGCAGAAAACAACCTGAACCTTCCAAAGATGGCTGAAAAAAGATGGATGCT
TCCAATCTGGATTCAATGAGGAGACTTGCCTGGTGAAAATCATCACTGGTCTTTTGG
AGTTTGAGGTATACCTAGAGTACCTCCAGAACAGATTTGAGAGTAGTGAGGAACAAG
CCAGAGCTGTGCAGATGAAGTACAAAAGTCCTGATCCAGTTCCTGCAGAAAAAGGCA
AAGAATCTAGATGCAATAACCACCCCTGACCCAACCACAAATGCCAGCCTGCTGACG
AANCTNCAGGCCAGAACCAGTGGCTGCAGGACATGACAACTCATCTCATTCTGCGCA
CTTTAACGAGTTCCTGCANTCCACCTGAGGGCTTTCGGCAAATGTACATGGGCCCTC
AAATGGTGGTGGTAATGGCATTCTTNTTTGGCANAAACCTGTCCCTTGGCACAAACT
TATNTGGTNTTTTTGGAAACTAAAATNTAACGTTNGACCTATTTTAATATTTTAAAT
TATTAAANTTAAAATGNGAACT
BSK-2C5-A1 - forward
GCCAGAGGCTGTTCACCTTGGAGACCTGCTGCGGATATGGGTACGGCCCGGCGCGAG
ATTTACACCCTCTCCCCCGGATTTTCACGGGCCAGCGAGAGCTCACCGGACGCCGCC
GCAACCGCGACGCTTTCCAAGACACGGGCCCCTCTCTCGGGGCGAACCCATTCCAGG
GCGCCCTGCCCTTCACAAAGAAAAGAGAACTCTCCCCGGGGCTCCCGCCGGCTTCTC
CGGGATCGGTCGCGTTACCGCACTGGACGCCTCGCGGCGCCCATCTCCGCCACTCCG
GATTCGGGGATCTGAACCCGACTCCCTTTCGATCGGCCGAGGGCAACGGAGGCCATC
GCCCGTCCCTTCGGAACGGCGCTCGCCATCTCTNANGACCGACTGACCCATGTTCAA
CTGCTGTTCACATGGAACCCTTCTNCACTTCGCCTTCAAAGTTCTCGTTTGAATATT
TGCTACTACCACCAANATCTGACCTTGCGGNGGTTCNCCCGGCCCGCGCCTAGCTTT
AAGCTNANCGAACGGCCTTCTATCTNNNGGNGTACGTCCNGGGGTTCGGGGCGGGAG
CGCGGAATCANTNACCCCGCCGCNCCTTACAANTGCTNTGGGGNNAAANAAAATAAN
CGGCNGGCCTGNNAGCCAATTCA
BSK-2C5-A1- reverse
CGCTCCCCGCCCCCGGAGCCCCGCGGACGCTACGCCGCGACGAGTAGGAGGGCCGCT
GCGCTGAGCCTTGAACCCTAGGGCGCGGGCCCGCGTGCAGCCGCCGCAGGTGCAGAT
CTTGGTGGTAGTAGCAAATATTCAAACGAGAACTTTGAAGGCCGAAGTCGAGAAGGG
TTCCATGTGAACAGCAGTTGAACATGGGTCACTCGCTCCTGAGAGATGGGCGAGCGC
CGTTCCGAAGGGACGGGCGATGGCCTCCGTTGCCCTCGGCCCGATCGAAAGGGAGTC
GGGTTCAGATCCCCGAATCCCGAGTCGCGGANATGGGCGCCCGCGAGGCGTCCAGTG
CGGTAACGCGACCGATCCCGGANAACCCGGCGCGAGCCCCGGGGAGAAGTTCTCTTT
TCTTTGTGAAGGGCANGGCGCCCTGGAATGGGTTCGCCCGAGAGANGCGCCCGTGTC
TTGGAAGCGTNNNCGNTNCGGCGGGGTCCGGNGAGCTNTTNNTGGNCCCTGAAAATC
CGGGGAAANGGGGNAAATTTNNGCCGGGCCNACCCNTNTCCNANNAGGTTTCCAGGC
GAANANC
BSK-1E15-3 - forward
ANNAAAGTTGGANCCNTTNNTNCGACTACTATAGGGCGAATTGGGCCCTCTAGATGC
ATGCTCGAGCGGCCGCCAGTGTGATGGATATCTGCAGAATTCGCCCTTGGGATTGGT
GGCGACGACTCCTGGAGCCCGTCAGTATCGGCGGAATTCCGGCTTGTGCGTCAGGGA
GCACACCAGGCAAGAACCCCAGGTGGTGATGGCTCCAGAGGTTCTGAGAAGGAACAC
GCACAGGGCACACTCGGACGGCACAGGAAGTGAGGCTGCGGGTGGCCGGCTGGGCTG
CAGGGCTGCGGTGGGAAGCCCAGAACAGGGGCGCACCTTGCTCAGCAGGAAAAGCCC
ATGGGGAGGGGGTGAGCACGGAGCCAGGGCTCTCTGAAGTGTCCAGGTGCAGGGCAA
GGTGCCCACACACCATAAGGCACTTAAATGGCCACAAAGTCATCTCAGAAGAGTAAT
ATGACAAGTGCCTGGTCTCTAAAAAGCACAAGGGTGACCTCTGCATAGAAACAGTCC
CCCACCCCATCAGGCTGCCAGGGCAGGCTCACCTGGCGTCAAAACGATAGGATCAGG
CTCCCCTCGGTTCCCATAGTAGCAAATGACGTCTCCCTTTGCTGTGCTGCAGGCCAA
GGGGAGAGAATGTCAGACTACAGCCATAGGGCGTCCTCCCCGACACTGCCCGGTGAT
CTCACAGCCCTGTTTCTGGAGGCTAGCGATGTGCGCAGTAACCCGCTGCGGCCAGGT
CANGACTTGCAGGACCCANCCCTNANGTGCCTGCAGCCGGGTCATGGAGGCCCCAAC
TNTTGTCCACATTACNGGTATGTTCCCAACTNACTTNGGGGCCACCAGCCCAGAGGC
NCAGGATCTAAAAGGCCTCTTGCATCCCAATCCCATGGNATGGACCCACAAAGNTTG
CCTTGGGACANTTNAGGGCTGANCCCCTTNCCNCATTACCAACTTTTCATTAGGCCC
TTACCAAAGTTANTTNTAAGGTTTTTGGANAGNGGCCCNTTNGCCCANGNGATTAGG
TTCAAAAAAGGCCAAAACCATTTTNTTACTTNAANGTAAGGGCNNTTAAAAATTNGG
GNCTTAANTGGCTTNNGNNNTCCTTTTCCCTTNTNNGGAANANGGGGGGGNCTTTTT
GCCCNNTTTAAACC
BSK-1E15-3 - reverse
TGTGTGATGTGGTATTGAGGATTGGAATATTTTCAGCTGGGGAGCATTTTGAACTAT
TTTCTTTTTAAAAAATGATTTATTTATTTTGTAGAGATGGGGTCTTGCTATGTTGCC
CAGTCTGGTTTCAAACTCCTGGCCTCAAGCAGTCCTCCCTCCTTAGTCTCCAGATTA
GCTGGGACTATAGGCATGAGTCACTATGCCCAGCTCTACTGTCCCTTAACTATTTTA
AAGTGTACACTTAACACTTGAGAGTAGGAAAATGTGGTCTTTGGCGCTTTCTTTGGA
AGCCTCGATCACCCTGGGGCCACACTGGGGCCACCTGTCCAGAAACCCTCATAGATG
AGCTGTGGTAAGGGGCCTGATGGAGAGGTTGGTGATGTGGGGATGGGGCTCAGCCCT
GCAGTTGTCCCCATGGGCAGCCTCTGTGTGTCCATGCCATGGGGCATTCGGCATGGC
AGGAGGGCATTTTAGATCCTGTGCCTCCTGGGCTGGTGGGCCCCGAGGTGAACTGGG
AACATACCCGTGATGCTGGACAAGANCTGGGGCCTNCATGACCCGCTGCCAGCACCT
GANGGGCTGGGTCCTGCAAGCTCCTGACTGGCCGAACCGGCTACTGNGCACATCGGT
AGCCTCCANAACAAGGCTGTGANNCACCCGGCATGTCNGGGAGGACNCCCTNTGGTG
GAANCTNACATTNTTTCCCTGGCCTGAAGNCANCAAAGGGAGACGCATTTGCTCTAT
GGGAACCNNGGGGGACCTGNNCCTATNNTTTACCCNGGNGAACCTCCTTGNAACCNN
NNGGGTGGGGNCGTTTTNTCCAAGNNACCTTGCTTTTTAAAACCNGNCTTTGNAAAN
ACNTTT
BSK-1H5-4 - forward
CGCGGGATTCCGGTGAGAAGTATCCGCGACGAGCTATCCGGGAAAGGGCCGAATGCG
ATCAAACCTAATCCGCGAGACTTGCTAAAATTCTCCAAGTCCCGGCTGCTTATGTAC
CTATCGAGCCAGATTCACCACCGTCATTATCAACTCATTTTATGAAAAAATGTAATC
TAAAGTATATCCTTGTTGAAAAAAAACAAATTAATGTATTCTTTATGACCAGTAGGA
GTTGGACATAGCAAAACCCAAAAAGGAGTTGGGCGCAGCAAAACCTTGCTTCCTATC
CCATGATTTTGATGATGGTGTAAGTGTTCTTCCTTCATTTAACACAGGAACGATCAA
AATTTAAATCTTTTCATGAAACATTATTGAACTATGATACATTTACAGTGGAACATA
ATGACCTAGTGCTCTTCAGACTTCACTGGTAAAATACTGAGGT
BSK-1H5-4 - reverse
ATTATTTTTGACACCAGACCAACTGGTAATGGTAGCGACCGGCGCTCAGCTGGTTCA
TATTTCTCTTTTCCATCATTTAGCATCAAGTTCACCTCAGTATTTTACCAGTGAAGT
CTGAAGAGCACTAGGTCATTATGTTCCACTGTAAATGTATCATAGTTCAATAATGTT
TCATGAAAAGATTTAAATTTTGATCGTTCCTGTGTTAAATGAAGGAAGAACACTTAC
ACCATCATCAAAATCATGGGATAGGAAGCAAGGTTTTGCTGCGCCCAACTCCTTTTT
GGGTTTTGCTATGTCCAACTCCTACTGGTCATAAAGAATACATTAATTTGTTTTTTT
TCAACAAGGATATACTTTAGATTACATTTTTTCATAAAATGAGTTGATAATGACGGT
GGTGAATCTGGCTCGATAGGTACATAAGCAGCCGCGACTTGGACAATTTTAGCAAGT
CTCGCGGATTAGGTTTGATCGCATTCGCCCCTTTCCCGGATAGCTCGTCGCGGATAC
TTCTCACCGGAATCCC
BSK-36-8 - reverse
CGGAATCCGGTGGACGCCGTGCCGTTACTCGTAGTCAGGCGGCGGCGCAGGCGGCGG
CGGCGCCATAGCGCACAGCGCCCCTTAGCAGCAGCACCAGCAGCAGCAGCATCGGAG
GTACCCCCGCCGTCGCAGCCCCCGCGCTGGTGCAGCCACCCTCGCTCCCTCTGCTCT
TCCTCCCTTCGCTCGCACCATGGCTGATCAGCTGACCGAAGAACAGATTGCTGAATT
CAACGAAGCCTTCTCCCTATTTGATAAAGATGGCGATGGCACCATCACAACAAAGGA
ACTTGGAACTGTCATGAGGTCACTGGGTCAGAACCCAACAGAAGCTGAATTGCAGGA
TATGATCAATGAAGTGGATGCTGATGGTAATGGCACCATTGACTTCCCCGAATTTTT
GACTATGATGGCTAGAAAAATGAAAGATACAGATAGTGAAGAAGAAATCCGTGAGGC
ATTCCGAGTCTTTGACAAGGATGGCAATGGGTATATCAGTGCAGCAGAACTACGTCA
CGTCATGACAACTTAGGACAAAAACTAACAGATGAAGAAGTAGATGAAATGATCAGA
GAAGCAGATATTGATGGAGACGGACAAGTCAACTATGAAGAATTCGTACAGATGATG
ACTGGCAAATGAACACTACTTTAACTCCTTTTCCCCTNTAGAAGAATCAAATTGAAT
CTTTACTTACCTCTTGC
BSK-83-1
GTTCAAACAGCAAACGCCCACACATGGCCCAGAGGTGGTGGTAGTCAGGGTGTGTGG
GTGTTTTTAGGGTTCTTTAGTGTTGTTTCTTTCACCCACGGGTGGTGGTCCCAGCCA
GTTTGGTGCTGACGGTGAGAGGAAATTAGAATCTGTTTGCAAATTGTCCAACCCACC
CCCTCAACATGAGGGGCTTCCATTTTCTGTGTTTTGTAAGGGAACTGTTTCCTTCAT
GCCGCCATGTTCCTGATATTAGTTCTGATTTCTTTTTAACAAATGTTATCATGATTA
AGAAAATTTCCAGCACTTTAATGGCCAATTAACTGAGAATGTAAGAAAATTGATGCT
GTACAACGCAAATAAAGCTCTTTATTAACCTTG
BSK-2G12-A5 - forward
GCACACTGGCGGCCGTTACTAGTGGATCCGAGCTCGGTACCAAGCTTGATGCATAGC
TTGAGTATTCTATAGTGTCACCTAAATAGCTTGGCGTAATCATGGTCATAGCTGTTT
CCTGTGTGAAATTGTTATCCGCTCACAATTCCACACAACATACGAGCCGGAAGCATA
AAGTGTAAAGCCTGGGGTGCCTAATGAGTGAGCTAACTCACATTAATTGCGTTGCGC
TCACTGCCCGCTTTCCAGTCGGGAAACCTGTCGTGCCAGCTGCATTAATGAATCGGC
CAACGCGCGGGGAGACGCGGTTTGCGTATTGGGCGCTCTTCCGCTTCCTCGCTCACT
GACTCGCTGCGCTCGGTCGTTCGGCTGCGGCGAGCGGTATCAAGCTCACTCAAAGGC
GGTAATACGGTTATCCACAGAATCAGGGGATAACGCAGGAAAGAACATGTGAGCAAA
AGGCCAGCAAAAGGCCAGGAACCGTAAAAAGGCCGCGTTGCTGGCGTTTTTCATANG
CTCCGCCCCCTGACAGCATTACAAAAATCGACGCTTCAAGTCAGANGTCGCGAACCC
GACAGGACTATAAAGATCCANGCGTTTCCCCTGGAACTTCCTCGGCGCTNTCTGTTC
GACCCTGNCGTTACCGGAACCTGTCCGCNTTNTCCTTCGGAAGCGNGGGCTTTNTAT
ACTTACGCTGAAGTATCTNATTCGGGGAGNCGTCGNTCAACTGGCTGGGNGCACAAC
CCCCGTTAGCCGACGTGNGCTTACCGGAATNTNGNTGGTCAACCGCNANACCANTAT
CGCNTGNNNANCNTGNACAGATACCANCAGGTTTAGGGGGTTCAAATTTAAGGGGCC
ATCCGTANTAAAAACAATGGTTTCCNG
BSK-2G12-A5 - reverse
CAGATATCCATCACACTGGCGGCCGCTCGAGCATGCATCTAGAGGGCCCAATTCGCC
CTATAGTGAGTCGTATTACAATTCACTGGCCGTCGTTTTACAACGTCGTGACTGGGA
AAACCCTGGCGTTACCCAACTTAATCGCCTTGCAGCACATCCCCCTTTCGCCAGCTG
GCGTAATAGCGAAGAGGCCCGCACCGATCGCCCTTCCCAACAGTTGCGCAGCCTGAA
TGGCGAATGGACGCGCCCTGTAGCGGCGCATTAAGCGCGGCGGGTGTGGTGGTTACG
CGCAGCGTGACCGCTACACTTGCCAGCGCCCTAGCGCCCGCTCCTTTCGCTTTCTTC
CCTTCCTTTCTCGCCACGTTCGCCGGCTTTCCCCGTCAAGCTCTAAATCGGGGGCTC
CCTTTAGGGTTCCGATTTAATGCTTTACGGCACCTCGACCCCAAAAAACTTGATTAA
CGGTGATGGTTACGTAGTGGGCCATCGCCCTGATAGACGGGTTTTCGCCCTTTGACG
TTGGAGTCCACGTTCTTTAATAGTGGACTCTTGGTNCAACTGGGACAACACTTAANC
CTATCTCCGCTATTCTTTTGATTATAAGGGATTTGGCCATTCGCGCTATTGGTTAAA
AAACACTGATTAACAAAATTTAACGCGAATTTACAAATTCAGGCCCAAGGCTGTAAG
GAANCGACACTAAAAGCCATCCGAAAACCGGTTANCCCGATAAAGGAACTATGGGTT
TTGGGAAAGGAAACCAACCCAAAAAAGCGNACTTNAAGGGCTACTGNAAAGTAAANG
GNGTTATGAAGAACAACGATGCANNGCCCCTTGAAGTGGAACCCGAAAAATGAGGTT
TTG
BSK-2G14-A2 - forward
GTGGTTTTGCTTTGTTCTTACTAGGTTTTCGTGCCACCTTCCCTGCCTGCGCTTGTG
CCCCCTCTCCTCCTTCGCACTGGCGGCCTCCTTGCCTCCCTTCCACCCGTGCTGCCA
TCCCGTGCCTGTCGTGTTGGTTCTTCACACGTGCTCTGTTCTCGGGGTTGTTCCATT
CATGCCTTCTTCGAGGGTGAGGGTGGCTTGGGAACCGACCCAGTGATCATGCCTACT
TTCTTCTTTCTATCTCCCTCCTTCCCAGCCCACCCGGGCAGCAGACTCTGATGGAAG
GAAGGTGCCCTAGGTGGGCTTTTAGAAACTAACCGGACTGGTTTTCAAAGCAGTTAT
CTTGGGAAACTGTTTATTCCAGCGATGTGACTTTTTTCAGAATATTTCTTGGAATCA
TATTCANAGTCTGGGGCTGTGTGTTCAGCAGCCTTAAGGATGCTAGACACTCATTTA
GTGCCCAAGGAGTCCAGCGAATGACGTCTGNGGCAACCAGGCTCAGNGCAAGCAAAA
GGACCATTTAAAGTAAATACTTGGATCAATCTGTGACTCTTAAATGGCTNAAAAGAA
TTTGNATTCAAAAGGGTTGAACCCTGGCACGTTGGCNTGGGAGCTATANCTTGATCC
TTGGANAAAAATTCATTGGTGGGGAACTGATTGGTNGGANAAANTGGCTGCTACTTN
TGGNATCCAGGTNTGACTTACAGGGAAAAAAAAAAAACGCGANTGANGGTCAGATNN
NNCCCATCANCCATTCACCATNGGGCNNNTANGGTCCNCCNGNCAACTNAGCAANTG
NATTNATNGGCCCAAAACTGGGAACNGGCNATTTCNNG
BSK-2G14-A2 - reverse
GCCCCTGGTAAAAGTCAGAACCTGGGATGACCAGAAAGTAACAGGACAGATTTCTCC
CAGCAAATCAGTCTCCACAACCAAATGAATATTGTTCTCCAAGGAGTCAAGCTATAG
ACTCACAATGACAACGTGGCCATGGCTCAAAACACTCTCTGAAATTACAAAATTGCT
TTCTGAGCCAATTTAAGAGTCACATGATTGAATCCAAGCTATTTTACTTTAAATGGT
CCTTTTGCTTTGCACCTGACACCTCGCTTGGCCACAGACGTCATTCGCTGGACTCCC
TGGGCACTAAATGAGTGTCTAGCATCCTTAAGGCTGCTCAACACACAGCCCCAGACT
CTGAATATGATTCCAAGAAATATTCTGAAAAAAGTCACATCGCTGGAATAAACAGTT
TCCCAAGATAACTGCTTTGAAAACCAGTCCCGTTAGTTTCTAAAAGCCCACCTACGG
CACCTTCCTTCCATCANAGTCTGCTGCCCGGGTGGGCTGGGAAGGAGGGAGATACAA
AGAAGAAAGTAGGCATGATCACTGGGTCGGTTCCCAAGCCCCCTCACCCTTCAAGAA
GGNATGAATGGACAACCCCGAGAACAGAGCCGTGTGAAGACCACCNACNGCNCGGAT
GCCACACGGTGGAAGGAGGCAGGAGGCCNCNGTGCCANGANGANAGGGCNCAACCCA
GCCGGAAGNGGCCCAAACCTATACAACAAGCAAACCCCGGATTCNCTGACCCGGCNT
ACCTACCATNGGNGGGNNAAANATATACCGGCGGCTGCAGCCAATTGAAATCATAAC
TGNGGCGTCACTGCTTNAGGCCATTNCCTANGGGGATAAATNTGCGGGTTNACGGCC
G
BSK-2H11-B3 - forward
AGAAATCTTTTAATGTTTATTCAAAGGACAAAATAAAGACTATGAACCAATGAGACA
CATAGTAAAAAAGTACAATTTTAATATAGTGAATGTAATATATATGTAATTACTCAT
AACAAAATGGTCAAAACCTTTAAAAGATACACAATAGGCATCTAAAAAGCTCAGCAA
TGCTAAATATATAATATATATTATATATAAATATATAATATATAAATACATACGTTT
TTACCAAGAAATGTTTTATTTTTCTTCCAGTAGCTTTGTTAATTGCACAAAATTATG
TTTTGTTTTTGCCATTTAAATATTATCACAGAATCCTATTCTGAAAGACAAATGTTC
ATTAAAAACAAAGCAAAAATAGAAATTCACAACCATTAATTACCTAGGTTTGTCATT
TAAAGCTTTAAAGAAAAAAAGGGAGGAGCTTTCCTACAAGCCTTTTCCAAGTGTCAC
ATTTTCTCTTTAAAAGGGAAGGATTTNCAAACAAAGGTGAAATAGCTTAAACAGAAA
TATTTGTAAAAATAAACTTTANGCATTATCAAGGATATTAAGACACACTGACTAACC
CCGTTCATTACCCGNATCTTCCCCNCCCCACCCCAGTGGGTCCACCAGGACTAGAAC
AGNTTTACNTTANACAGAAATGCTTCAAATCCCAGGGAAAGAACTGGCTAAAANCCG
CAGGNTTTTNCTGCCTCCCGTGCCGTNGTTTTGAATCTTTACCAGGTTTCTTGGAAG
GGCCAACTGGAGTGGGAGGACTGCCACGGGCCCTTTTTATATGGATCNTGGGCCGCG
TCCTTCAGTGGTGGGGAAAAAAAACGGGGC
BSK-2H11-B3 - reverse
ATAATTATATATAAGGTGGCCACGCTGGGGCAAGTTCCCTCCCCACTCACAGCTTTG
GCCCCTTTCACAGAGTAGAACCTGGGTTAGAGCATTGCAGAAGACGACCGGCAGCGG
GGAGGGCAGGGAAGATGCCTGTCGGGTTTTTAGCACAGTTCATTTCACTGGGATTTT
GAAGCATTTCTGTCTGAATGTAAAGCCTGTTCTAGTCCTGGTGGGACACACTGGGGT
TGGGGGTGGGGGAAGATGCGGNAATGAAACCGGNTAGNNAGNGNTGNCTTAATATNC
TTGATAATGCTGNANAGNTTATTNTTACAAATATTTNTGTNTAAGCTATTTCACCTT
TNNTTGGAAATCCTTCCCTTTTAAAGANAANATGNGACACTTTGTGAANAGGCTTGT
NNGAAAGNTCNTCCC
BSK-2H11-A5 - forward
AAGAAATATGGGACTATGTGAAAAGACCAAATCTACGTCTGATTGGTGTACCTGAAA
GTGATGTGGAGAATGGAACCAAGTTGGAAAACACTCTGCAGGATATTATCCAGGAGA
ACTTCCCCAATCTAGCAAGGCAGGCCAACGTTCAGATTCAGGAAATACAGAGAACGC
CACAAAGATACTCCTCGAGAAGAGCAATTCCAAGACACATAATTGTCAGATTCACCA
AAGTTGAAATGAAGGAAAAAATGTTAAGGGCAGCCAGAGAGAAAGGTCAGGTTACCC
TCAAAGGAAAGCCCATCAGACTAACAGCGGATCTCTCGGCAGAAACCCTACAAGCCA
GAAGAGAGTGGGGGCCAATATTCAACATTCTTAAAGAAAAGAATTTTCAACCCAGAA
TTTCATATCCAGCCAAACTAAGCTTCATAAGTGAAGGAGAAATAAAATACTTTATAG
ACAAGCAAATGCTGAGAGATTTTGTCAACACCAGGCCTGCCCTAAAAGAGCTNCTGA
AGGAAGCGCTAAACATGGAAAGGAACACCGGTACCANCGNTGCAAAATCATGCCAAA
TGTAAAGACCTCGAGACTAGGAAGAACTGCTCACTAACGAGCAAATCCCACCTTACA
TCTTATGACGGGTCAATTCCCCNTACATATACTTTAATNTAATGGCTAANTCTGCAN
TAAAAGACNNGACTGNAGTTGGTAAGAGCAGACCTNATGNGTTGNTCNGAACCATTA
CTGNNAACCCNNGGTCAATAAGGTGNAAGATTNCNGCCTGGAACAAAAGNGGGTGGA
TCTACTTGTAACCGCTTTACCNCAAACAAAAACAAAGGCTTCTTTGNANGGTCATCC
CAAGNNTCNTN
BSK-2H11-A5 - reverse
GTTCTGTAGATGTCTATTAGGTCCGCTTGGTGCAGAGCTGAGTTCAATTCCTGGGTA
TCCTTGTTGACTTTCTGTCTCGTTGATCTGTCTAATGTTCACAGTGGGGTGTTAAAG
TCTCCCATTATTAATGTGTGGGAGTCTAAGTCTCTTTGTAGGTCACTCAGGACTTGC
TTTATGAATCTCGGTGCTCCTGTATTGGGTGCATAAATATTTAGGATAAGTTAGCTC
CTCTTGTTGAATTGATCCCTTTACCATTATGTAATGGCCTTCTTTGTCTCTTTTGAT
CTTTGTTGGTTTAAAGTCTGTTTTATCAGAGACTAGGATTGCAACCCCTGCCTTTTT
TTGTTTTCCATTGGCTTGGTAGATCTTTCTCCATCCTTTTATTTTGAGCCTATGTGT
GTCTCTGCACGTGAGATGGGTTTCCTGAATACAGCACACTGATGGGTCTTGACTCTT
TATCCAACTTGCCAGTCTGNGTCTTTTAATTGCAGAATTTAGTCCATTTATATTTAA
AGGTAATANTGGTATGNGTGAATTGATCTGNCATTATGATGTAGCTGGNGATTTGCT
CGTAGTTGATGCAGTTCTTCTAGCTCATGGCTTACATTTGGCATGATTTGCACGGTG
GACCGGTGGTCCTTTCATGTTAACCTTCTTCAGAGCNTTTAGGCAGGCTGGNGTGAC
AAAACTTAACATTTGCTGGCATAAGATTATTCTCTTACTTATAACTTATTGGTGGAA
TNAATCTGGTGAAATNTTTTTAAAANTGAAATGGCCCCNTTTTNGGTTGAGGTTTTC
CAAANCNTTAACNNNGNTTCTTAGGACCCCG
BSK-2H12-A4 - forward
CTTTAAAGTAGTTTTTTCCAATTCAGTGAAGAAAGTCATTGGTAGCTTGATGGGGAT
GGCATTGAATCTATAAATTACCTTGGGCAGTATGGCCATTTTCATGATATTGATTCT
TCCTACCCATGAGCATGGAATGTTCTTCCATTTGTTTGTATCCTCTTTTATTTCCTT
GAGCAGTGGTTTGTAGTTCTCCTTGAAGAGGTCCTTCACATCCCTTGTAAGTTGGAT
TCCTAGGTATTTTATTCTCTTTGAAGCAATTGTGAATGGGAGTTCACTCATGATTTG
GCTCTCTGTTTGTCTGTCGTTGGTGTATAAGAATGCTTGTGATTTTTGTACATTGAT
TTTGTATCCTGAGACTTTGCTGAAGTTGCTTATCAGCTTATGGAGATTTTGGGCTGA
GACAATGGGGTTTTCTAGATATACAATCATGTCGTCTGCAAACAGGGACAATTTGAC
TTCCTCTTTTCCTAATTGAATACCCTTTATTTCTTCTCCTGCCTAATTGCCCTGGCC
AGAACTTTCAACACTATGTTGAATANGANTGGTGANAAAAGACATNCCTGCTTGGGC
CAGTTTCAAAGGAATGCTTCCAGTTTTGNCATTCATATGATATGGCTGGGGGTTGGC
ACAAAACTCTTATATTTGAAAACCGTCCACATACCAATTATGAAAGTTTAACTGAAG
GTGGTGAATTTGCAAAGCTTTTTGCACAATGAAAAACATGGGTTTGCTTGCCTNTAA
TCCGATACATATGATGGAATTGACNACTGCTCCAGGATANCCNTGACTGGGGNAACN
TTAAGGNGTGATCGTGCNNTTTTTGNGATTGCNAAGCCCAGG
BSK-2H12-A4 - reverse
GAGAAAATCTAGAAGAAATGGATAAATTCCTCGACACATACACTCTCCCAACACTAA
ACCAGGAAGAAGTTGAATCTCTGAATAGACCAATAACAGGATCTGAAATTGTGGCAA
CAATCAATAGCTTACTAACCAAAAAGAGTCCAGGACCAGATGGATTCACAGCCGAAT
TCTACCAGAGGTATAAGGAGGAGCTGGTACCACTCCTTCTGAAACTATTCCAATCAA
TAGAAAAAGAGAGAATCCTTCCTAACTCATTTTATGGGGCCAGCATCATTCTGATAA
CAAAGCCGGGCAGAGACACAACCAAAAAAGAGAATTTTAGACCAATATCCTTGATGA
ACATTGATGCAAAAATCCTCAATAAAATACTGGCAAACCGAATCCAGCAGCACATCA
AAAAGCTTATCCACCATGATCAAGTGGGCTTCATCCCTGGGATGCAAGACTGGTCAA
TATATGCAAATCAATAAATGTAATCCAGCATATAAACAGAGCCCAAGACAAAAACCA
CATGATTATCTCAATAGATGCAGAAAAAGCCTTTGACAAAATTCAACACCCTTCATG
CTAAAAACTCTCAATAATTANGTATGATGGACGTATTTCAAATAATAAGAGCTATTG
NGACAACCCCAGCCATTCTACTGATGGCAAACTGGGAGCATTCCTTGAAACTGGACA
GACNGGTGCTTNTACACTCTATCACTAGGGTGAAGTTGGCAGGCATAGCGGNANGAT
ANGGNTCATNGGAAAAGGAGCAATNCTGTTGNACAATGTGTTTAAAACCCTGGTACC
AATTCTACGTACATNGAACTNGTCAATANNCAATCAGNTT
BSK-2H9-A3 - forward
TGTAATCCCAGCACGTTGGAAGGTTGAGGCGGGTAGATCATGAGGTCAGGAATTCAA
GATCAGCCTGGCCGGGATGGTGAAACCCCATCTCTACTAAAAATACAAAAATTAGCC
AGGTGTAGTGGTGGGCGCCTGTGGTCCCAGCTACTATGGTGGCTGAGGTGCGAGAGT
CGCTTGAACCTGGGAGATGGAGGTTGCAGTGAGCCAAGATCGTACCACTGCACTCCA
GCCTGGGCAACAGAACAAGACTCCATTTCAAAAAAAGAAAATTCTTATTTGCCATGA
GCCGAGGAATGCACAGGTACTAACTAGATGGTGTGGACAGCTGACGCAAACTGGGCA
TATACAATGGGACACACCTGTACTAGGATGAAAGGCACAGCCTANAGGGCTGGCAGG
TGTTGGGTAATGCTCAAGTTTCAGAGTGATGGCAGAAGAGTAGGTTGGTAGGCCCTC
ATGGCTCTGCTTGGCAGCACNGAGTTCCGCGGAATTCCGCCATCTGACGGCTCCANG
AGTCGTCGCCCAATCCAAGCCGAATTNCACACACTGGCGGCCGTACTAGTGGATCCG
ACTCGGACCAACTTGATGCATAACTTGAGTATTCTATATGNCACCTAAATAGCTTGG
CGTAATCATGGCATACTTGTTTCTGNGNGAAATTGTATCCGNTACAATTCNCACACA
TACANCCGAAGCATAAGTGNAAGCNGGGGNCCCTAATGAGTGACTACTACTTATTGG
GTGGCTACTGCCGTTTCANCGGAAACTGCTGCNANTCTTATNATCGCCACCNCGGGA
ACNGGTGNGNTGGCNTTTCCTCTGTATTATCTGCTGCTTGGTGGGAACGGTA
BSK-2H9-A3 - reverse
CGGAACTCCGTCCTGCCAAGCAGAGCCATGAGGGCCTACCAACCTACTCTTCTGCCA
TCACTCTGAAACTTGAGCATTACCCAACACCTGCCAGCCCTCTAGGCTGTGCCTTTC
ATCCTAGTACAGGTGTGTCCCATTGTATATGCCCAGTTTGCGTCAGCTGTCCACACC
ATCTAGTTAGTACCTGTGCATTCCTCGGCTCATGGCAAATAAGAATTTTCTTTTTTT
GAAATGGAGTCTTGTTCTGTTGCCCAGGCTGGAGTGCAGTGGTACGATCTTGGCTCA
CTGCAACCTCCATCTCCCAGGTTCAAGCGACTCTCGCACCTCAGCCACCATAGTAGC
TGGGACCACAGGCGCCCACCACTACACCTGGCTAATTTTTGTATTTTTAGTAGAGAT
GGGGTTTCACCATCCCGGCCAGGCTGATCTTGAATTCCTGACCTCATGATCTACCCG
CTCACCTTCCAACGTGCTGCGATTACA
BSK-2I5-4B - forward
CTGTTTAATTAAAACAAAGCATCGCCAAGGCCCGCGGCGGGTGTTCACGCCATGTGA
TTTCTGCCCAGTGCTCTGAATGTCAAAGTGAAGAAATTCAATGAAGCGCGGGTAAAC
GGCGGGACTAACTATGACTCTCTTAAGGTAGCCAAATCCCTCGTCATCTAATTAGTG
ACGCGCATGAATGGATGAACGAGATTCCCACTGTCCCTACCTACTATCCAGCGAAAC
CACAGCCAAGGGAACGGGCTTGGCGGAATCAGCGGGGAAAGAAGACCCTGTTGAGCT
TGACTCTAGTCTGGCACGGTGAAGAGACATGAGAGCTGTAGAATAAGTGGGAGCCCC
CCGGCGCCCCCCCGGTGTCCCCGCGAGGGGCCCGGGCGGGGTCCGCCGGCCCTGCAG
CCGCCGGTGAAATACCACTACTCTGATCGTTTTTTCACTGACCCGGTGAG
BSK-2I5-B4 - reverse
CTCACCGGGTCAGTGAAAAAACGATCAGAGTAGTGGTATTTCACCGGCGGCCTGCAG
GGCCGGCGCACCCCGCCCCGGGCCCCTCGCGGGGACACCGGGGGCGCGCCGGGGGCC
TCCCACTTATTCTACACCTCTCATGTCTCTTCACCGTGCCAGACTAGAGTCAAGCTC
AACAGGGTCTTCTTTCCCCGCTGATTCCGCCAAGCCCGTTCCCTTGGCTGTGGTTTC
GCTGGATAGTAGGTAGCGACAGTGGGAATCTCGTTCATCCATTCATGCGCGTCACTA
ATTAGATGACGAGGCATTTGGCTACCTTAAGAGAGTCATAGTTACTCCCGCCGTTTA
CCCCCGCTTCATTGAATTTCTTCACTTTGACATTCAGAGCACTGGGCAGAAATCACA
TCGCGTCAACACCCGCCGCGGGCCTTCGCGATGCTTTGTTTTAATTAAACA
BSK-2I5-A5 - forward
CCCATTTAACTTTTTTAATGGGTCTCAAAATTCTGTGACAAATTTTTGGTCAAGTTG
TTTCCATTAAAAAGTACTGATTTTAAAAACTAATAACTTAAAACTGCCACACNCAAA
AAAGAAAACCAAAGTGGTCCACAAAACATTCTCCTTTCCTTCTGAAGGGTTTACNAT
GCATTGGTATCATTAACCAGTCTTTTACTACTAAACTTAAATGGCCAATTGAAACAA
ACAGTTCTGAGACCGTTCTTCCACCACTGATTAAGANTGGGGTGGCAGGTATTAGGG
ATAATATTCATTTANCCTTCTGAGCTTTCTGGGCAGACTTGGTGACCTTCCCAGCTC
CAGCAGCCTTCTTGTCCACTGCTTTGATGACACCCACCGCAACTGTCTGTCTCATAT
CACGAACAGCAAAGCGACCCAAACGTGGATAGTCTGAAAAGCTCTCAACACACATGG
GCTTGCCAGGAACCATATCAACAATGGCAGCATCCCAGACTTCAAGAATTTANGGCC
ATNT
BSK-2I5-A5 - reverse
AGATGGCCCTAAATTCTTGAAGTCTGGTGATGCTGCCATTGTTGATATGGTTCCTGG
CAAGCCCATGTGTGTTGAGAGCTTCTCAGACTATCCACCTTTGGGTCGCTTTGCTGT
TCGTGATATGAGACAGACAGTTGCGGTGGGTGTCATCAAAGCAGTGGACAAGAAGGC
TGCTGGAGCTGGCAAGGTCACCAAGTCTGCCCAGAAAGCTCAGAAGGCTAAATGAAT
ATTATCCCTAATACCTGCCACCCCACTCTTAATCAGTGGTGGAAGAACGGTCTCAGA
ACTGTTTGTTTCAATTGGCCATTTAAGTTTAAGTAGTAAAAGACTGGTTAATGATAA
CAATGCATCGTAAAACCTTCAGAAGGAAAGGAGAATGTTTTGTGGACCACTTTGGTT
TTCTTTTTTGCGTGTGGCAGTTTTAAGTTATTAGTTTTTAAAATCAGTACTTTTTAA
TGGAAACAACTTGACCAAAAATTTGTCACAGAATTTTGAGACCCATTAAAAAAGNTA
AATGGG
BSK-2K2-A1 - forward
CTGGGCTCTGGGCTAGTACTGGGGAGTATCTGCAGAATCCCGTGATATGATCCGTCT
TCAGCTAAAGATATTATTTCACAAGTGGAATGACAGCTGACTTCTCAACAACAACGA
AAGCAAGGAGACAGTTGAAAGACATCTTGAAAATGGAATTAGCAGTTCACAAAGCAC
ATTCGCATATAAGGGCTTGTTTTGAATTGATCTTGGCAGCAATTCTATGAAACAAGT
AAAAGCACAAGAGGAATAGGAACTGCACCTCTTCCTTCAGTTTCAGCTTGAATAATA
TCAGGAAGATTCGTATCGGTCTGAGTTGGGTCACGTACCCGACGTGCTATAGCTGAG
GATGGGGTAAGCTGATTCGAGTTTGCAACACTGTTCACAGAGCCAAGATATGGAAAG
AACCTAAATGTCAACTGGTGGATGAATGGATAAAGAAATTGTGGTATATACATACAC
TGGAATATTATTCAACCTTAAAAAGAAGGAAATCCTAACATTTGTGACAACATGGAT
GGACCTGGAGGGAATTATGCTGAGTGAAATAAGACAGACNCAAAAGACNTTTCTTGC
AGGAGCTCCTTATATGTGGAATCTAAATAGTCAGCTTAAAGAAGANAGTAAACTACT
GGTGTCAGGAGCAGGANAAAATGGAAATGAANAGGNGATAGTAAAGGGACAAAGTTC
AGTATCAANATAATAAGTTCTGGNGGTTACTATTAATANTCCATAGACCTATAATAC
CATACTGGTTGGTACTAAAATGCTAAAGGGTTTCTAATGTCTACCANANAAAANANA
NGGAAAATAAGGGCGGAGGCCCTNAAAGGGAGGATGTATGCCTGNGGGGAAGGTCTG
AAATCTNCCCACTATGNG
BSK-2K2-A1 - reverse
CACATACAAAAAGCTGTACATATTTAATATTTACATCTCAATTAGTTTGGGGATAAG
TATACTCTCATGAAACCATCACCACCATCAAGGCCATAAACATATCCATCACCTTTT
GAAGTGTCCTCCTGCCCCTTAATTATTACCATTATTATTATTATTATTGGTAAGAAC
ATATAAGATATACCCTCTTAGCAATTTTAAGTATACAATACAGTATTGNTACTTATA
GGTACTATGTGATATATTAATAGTAAACCTCCAGAACTTATTTATCTTGTATAACTG
AAACTTTCTACCCTTTAACTATCACCTCTTCATTTCCACTTTTCTCCTGCTCCTGAC
AACCAGTAGTCTACTCTCTTCTTTAAGCTTGACTATTTTAGATTCCACATATAAGTG
AGCTCCTGCAAGAAAGNCTTTTTGNGTCTGCTTATTTCACTCAGCATAATTCCCTCC
ANGTCCATCCATGTTGTCCAAATCGTAGGATTTCCTTCTTTTTAAGGTGAATAATAT
TCCAGTGTATGNATATACCACAATTTCTTATNCATTCTTCACCAGTGACATTAAGGT
CTTTCTATCTTGGCTNTCGGAACAGGGTGCAAACTCCAATCAACTTACCCATCCTAA
CTATAGACGTNGGTACGGACCCACTAAACGAACGAANTTCTGNNTATTAACTGAACT
GANGANAGGGGAGTCCATNCTTGGCTTTACTGGTCAAAAATGNGGCANACAATAAAA
ACCTTTTGCAACGGTTGGGACGTATCATTNANAGNTTACNGGTCTGTTCTGGGTGNA
NCATTNTCNTGGAAATTTTGCGAANGGCANTCGG
BSK-1A2-5 - forward
CTTTTATTTGCTGAGATATTGTTCTAATCCACTGAGTCAGATTTGGTTGGTCTGAAA
AATTTAACCTGTTGTTAAAAATATTTCTTGGAGGAAGCAGCAGAGGAATAACACTAT
TACTCAAGCATTCACAAAGGGGGCAAAGGAATTCTCCGTTTTCTACATCATAGCTCG
TATGTAAGCGTAATCTCTGTTGCCTTCGCTGTTCTTTAGCTTGAACGGAATCAAAAT
ACCTTTGCCAACAATGGGCATGCATAATGTGCCCACAGCTACTAGTGTGTGTTCCAC
AAGACAGATCAGGGTGCATGAATAATGGATCATATTTTTCTGGATCTTGAATAAATT
TACTTCTGTTTTTTGATAATACAGTTGATCTCTGAACAAATGCTGCCAAGACCATTG
CCCTGCTTTCCACTTTAACTTCTTGCTCCTCTTGACA
BSK-1C7-1 - forward
GTGGCTTGGAGGGGTTAAGAGACTTATCAAAGATCTTGGGGCTAGGTAGTAGAAAAA
CAGAAAAAAAATCAGGTTTTTCAACTGCAGTCAGTACTTTTTTAACAAATTAAAATA
TATCAAATCTCTTTCTCCTAGGTACCTAAAGGCCTAAAAATCCATCAACACAGGGAT
ATATATTAGAAAACCATACCAAGATAAAATGCAAAGGTCAAGAAAATAGAAATGTTA
AAACTCCTTTTGTATGTCATGTATTTCCACAGTTTTGTGGTGAACAAGTATGAATTT
AGGGAACTGGATACTAGAGAGAAAGGAATCATCTCCCTTCACTTGCTAAGGAATTGC
TGGTGCCCTGGGCCACAAGAAGGGTGTGATTTGGGGGGACTGTGTGCAATTAAACAG
GAAAGGAAATAACAGACTTAAAGTATTAAGTCATTCTGATGCTTATCAACAAGAGTA
AAGCACAGCCTAATAAATAAATATATTTGAGAATCTATATTAATCCAGACAGAATGA
CCAAGAGGCTTGATGTCCTGGNAATAACCACATGAAACCTTTTTATTNAAGGACTAC
CACTTATGAAATATGAAAGAATTCCTTANACAAATCCAATCTTANATCTGNATTCTN
AACATTTTCTCCCTTTCCATTTTGAATGCTAATATTAGAAGCATTNTAAAGTAATTT
NGGCCCGCCCATGGCTTACCCTGCAACTCGGACTTTGCAGGCCAGTGGGAGGACTCT
TGAGGCNAANTTTAAAACCNCNNGGCANATTNNCAAANCTGGGCATTTTTAAAANNG
ATNGGAACTTTTTNCCCCCCNANTANAACAATNTTCCNNCCCTTAAACCCNAACCTT
TCCCNGGGTTTTNCCCTAAGGGNCCCTTTTNTTTGAAACCCAAAAGGTNCNTTTGGG
TTNCANGNATTTNAAATTNTTTTNGNCCCNAA
BSK-1E2-A2 - forward
CAGGTTTCTGACCTGGGCTGCAGGGTGAAAGATAGTACTATTAGTTGAAATAGATAA
TACACAGAGAAGAGTAAATTTGGCAAGAACATATTTTGTTTATGTTGAGTTCGTGCC
TGTGAGATACAGGTGGAGGTACCTAGAGACAATTCTGTAGAAGTCTGAAGTTTAGGA
GAGAGGGCAGAGTTGGAGATAAAATTTTAGGTTGTAAGCCTATCATAAATAGTTAAA
ATGGTGAGAATGAGGGAGATTGCTCAGGGCAGTGGTTCACAAATTTTGAGTTTTTCT
GTACAAAAATAAACTTGGAATAAATACCACATGTTCTCACCCATATATGGAAGCTGA
AAAAAAAATGAGCTCATAGAAGTACAGAGTAGAATCTAGAATCATGGTCATTAGAGG
TTGGGAAGGGTAGTGAGGAGAGGAGAATAGGCAGAGGTANCAGATACANAGTTACAG
CTGTTAGGGAGGAAAAAGTTCAGNGCTTTTGNACCATGCNCCCCTGANTNTGNNCAA
ATAATTNAGNCTTNTTTCNACCGCTANAAAAAGCATTTTGAATTTCCCNCCCNAA
BSK-1E2-B - forward
GGCATANNCTCGNTTTGTNANCAGGCTGGATCGAGTGCAGNGATNTNANNTNACTGN
AACCGCCACCTCCCGGGTTNAAGCNATTCCCTGACTCANCCTGTANNCCANTANCTG
GGACTACAGGCNTGCCCCACCTTGCCCGGNTAATTTTTTTTTTTTTNGGATTTTANT
AAAAACGGGGTTTNACCATNTTGGCCANAATCGNCTTGATCTCCTGACCTTCGGATT
ACCCCCACCTNGGCCTCCCAAAGGGNTG
BSK-1G13-A5 - forward
TAAATTTTTTTACTCTCTCTACAAGGTTTTTTCCTAGTGTCCAAAGAGCTGTTCCTC
TTTGGACTAACAGTTAAATTTACAAGGGGATTTAGAGGGTTCTGTGGGCAAATTTAA
AGTTGAACTAAGATTCTATCTTGGACAACCAGCTATCACCAGGCTCGGTAGGTTTGT
CGCCTCTACCTATAAATCTTCCCACTATTTTGCTACATAGACGGGTGTGCTCTTTTA
GCTGTTCTTAGGTAGCTCGTCTGGTTTCCCGGGTCTTAGCTTTGCCTCTCCTTGCAA
AGTTATTTCTAGTTAATTCATTATGCAGAAGGTATAGGGGTTAGTCCTTGCTATATT
ATGCTTGGTTATAATTTTTCATCTTTC
BSK-1G13-B3 - forward
AATCTATCACCCTATAGAAGAACTAATGTTAGTATAACTAACATGAAAACATTCTCC
TCCGCATAAGCCTGCGTCACATTAAAACACTGAACTGACAATTAACAGCCCAATATC
TACAATCAACCAACAAGTCATTATTACCCTCACTGTCAACCCAACACAGGCATGCTC
ATAAGGAAAGGTTAAAAAAAGTAAAAGGAACTCGGCAAATCTTACCCCGCCTGTTTA
CCAAAAACATCACCTCTAGCATCACCAGTATTAGAGGCACCGCCTGCCCAGTGACAC
ATGTTTAACGGCCGCGGTACCCTAACCGTGCAAAGGTAGCATAATCACTTGTTCCTT
AATTAGGGACCTGTATGAATGGCTCCACGAGGGTTCAGCTGTCTCTTACTTTTAACC
AGTGAAATTGACCTGCCCGCGAAGAGGCGGCATAACACAGCAAGACGAGAAGACCCT
ATGGAGCTTTAATTTATTAATGCAAACAGTACCTACAAACCCACAGGTCCTAAACTA
CCAAACCTGATTAAAAATTTCNGTTGGGGCGACCTCGGAGCAGACCCACCTTCGAGC
AGTACATGCTAAGACTTCACCAGTCAAAGCGACTACTATACTCAATTGATCCAATAA
CTTGGNCAACCGGAACAAGTTACCCTTANCGATAACAGCGCAATCCTATTCTAGAGT
CCTTTTAACCATAGGGGTTACCAACCTNAATGTTGGATCAAGGACTTNCCATGGNGC
AACCCGNTNTTAAGGGTCGTTGGTTAACGATAAAGGCCTCCGGAACTGNGTTAAACC
GGNGTAATCCAA
BSK-1G11-A5 - forward
GCATTGGGGTGGGGGTAAGGTGCATCTGTTTGAAAAGTAAACGATAAAATGTGGATT
AAAGTGCCCAGCACAGAGCAGATCCTCAATAAACATTTCATTTCCCACCCACACTCG
CCAGCTCACCCCATCATCCCTTTCCCTTGGTGCCCTCCTTTTTTTTTTATCCTAGTC
ATTCTTCCCTAATCTTCCACTTGAGTGTCAAGCTGACCTTGCTGATGGTGACATTGC
ACCTGGATGTACTATCCAATCTGTGATGACATTCCCTGCTAATAAAAGACAACATAA
CTC
BSK-1G11-B5 - forward
CTAATTACTACCTTTTATTCTAATGTGAACCATGGCCCTGAAAGCTGATAACAAGCT
TGGCTGAGCAGAGGGAACTAGGGGTCGGCAGAAAGGATTATGGGTGGAAAACATTGG
CTCTTCCTTGGGGAGTGATGCTGGGGAAAGGGAAGAGAGTGGCTCAGCCTGCAGGTA
AATAGGCTAGAAAAGCCAAGGCCAAAGGCTGGAGGGGAGAGGACAGTCAGCATGTCC
AGCCTGGGGTCTGGGTGTAGGGTTATCCCTTCTCCCTGTGCCTTCCCATCTCGTCCA
TGAGCCTAGGCCTTGGAGCCTTGTGTTGGAGGCTGCTGTGATGTCAGGAACGGGGAT
CTGCTAGCTTTTGGCCACTTCCTGGGACCTCACGCCCCTGTTGACAGATGGAGATTG
GGCAGCAGGGCCTTGCTGCATTGGTATCTGCTGTTCCACTTGGTTGGCTTGCCAAGG
TGACGAAAGACCAGGCACCANGGTCTCATGGGATGAAGGACAGGGTGGGAAGATGGG
GGAAGGGCTGGGGCTTAAGGGAGCAAGAAAGCTTGTACCTGTGTNGGGCCGGCAGGA
TGTTAAAAACCGCTTTGNTGTTTTAAAATGCGGACTGGGCCCAAATCCTGTTGGGCA
CCCANNCCCAAAANACGGGTCCTCCANTTCCAAGGGANNTTTNGGGGGAACCNNAAN
GGGCTTTTTTCCAGGAANGCCNGTTTTTTNAAACNGGANCCNTGGGCATTC
BSK-1H13 - forward
CGGGATTCCGGTGGCAACGTTGCTGGTGACAGCAAAAATGACCCACCAATGGAAGCA
GCTGGCTTCACTGCTCAGGTGATTATCCTGAACCATCCAGGCCAAATAAGCGCCGGC
TATGCCCCTGTATTGGATTGCCACACGGCTCACATTGCATGCAAGTTTGCTGAGCTG
AAGGAAAAGATTGATCGCCGTTCTGGTAAAAAGCTGGAAGATGGCCCTAAATTCTTG
AAGTCTGGTGATGCTGCCATTGTTGATATGGTTCCTGGCAAGCCCATGTGTGTTGAG
AGCTTCTCAGACTATCCACCTTTGGGTCGCTTTGCTGTTCGTGATATGAGACAGACA
GTTGCGGTGGGTGTCATCAAAGCAGTGGACAAGAAGGCTGCTGGAGCTGGCAAGGTC
ACCAAGTCTGCCCAGAAAGCTCAGAAGGCTAAATGAATATTATCCCTAATACCTGGC
ACCCACTCTTAATCAGTGGTGGAAGAACGTCTCAGAACTGTTGGTTCAATTGGNCAT
TAAGTTTAATAGTAAAAGACTGGGTAATGATACAATGCATCGTAAAACCTTCAGAAG
GAAAGGAGAATGTTTGTGGACCACTTTGGGTTTCCTTTTTGCGTGNGCANTTTTAAG
TATTAGNTTTTAAAACAGNCTTTTAATGGNACACTTGNCCNAAAATTTGCCCAAATT
TTGGAACCCTTTAAAAAGTTAATGGGAAAAAAAAACGGATTCCGGGGGTACCTTCCA
AAACTTTTAAAAANCNGGCCCGCATTTTTTCTGAGGGGTAACNNGTTCCCCATAATT
CCCCCNGGGANAAGCNTNTNNCTTTNGGGACCNTTTTGNANCCCCNTTTTAAGGCCC
CCCNTTTTAACAACCCCCCCCTTGCNTGGACNNANAAANNNCGGNTTTTTATTTTTA
NGAACAAACCNTTNGGTTCNAANCCCTTGGTCNCCCCGGGGGGTNNCNAAAATTTTT
TTCCCCNTTTTTNNGGGGNAAATTNGGGAAATT
BSK-1I2-A2 - forward
CTCCACGAGGGTTCAGCTGTCTCTTACTTTTAACCAGTGAAATTGACCTGCCCGTGA
AGAGGCGGGCATGACACAGCAAGACGAGAAGACCCTATGGAGCTTTAATTTATTAAT
GCAAACAGTACCTAACAAACCCACAGGTCCTAAACTACCAAACCTGCATTAAAAATT
TCGGTTGGGGCGACCTCGGAGCAGAACCCAACCTCCGAGCAGTACATGCTAAGACTT
CACCAGTCAAAGCGAACTACTATACTCAATTGATCCAATAACTTGACCAACGGAACA
AGTTACCCTAGGGATAACAGCGCAATCCTATTCTAGAGTCCATATCAACAATAGGGT
TTACGACCTCGATGTTGGATCAGGACATCCCAATGGTGCAGCCGCTATTAAAGGTTC
GTTTGTTCAACGATTAAAGTCCTACGTGATCTGAGTTCAGACCGGAGT
BSK-1I2-B5 - forward
GCTTTAATATACGCTATTGGAGCTGGAATTACCGCGGCTGCTGGCACCAGACTTGCC
CTCCAATGGATCCTCGTTAAAGGATTTAAAGTGGACTCATTCCAATTACAGGGCCTC
GAAAGAGTCCTGTATTGTTATTTTTCGTCACTACCTCCCCGGGTCGGGAGTGGGTAA
TTTGCGCGCCTGCTGCCTTCCTTGGATGTGGTAGCCGTTTCTCAGGCTCCCTCTCCG
GAATCGAACCCTGATTCCCCGTCACCCGTGGTCACCATGGTAGGCACGGCGACTACC
ATCGAAAGTTGATAGGGCAGACGTTCGAATGGGTCGTCGCCGCACGGGGGGCGTGCG
ATCGGCCCGAGGTTATCTAGAGTCACCAAAGCCGCCGGCGCCCGCCCCCGGCCGGGG
CCGGAGAGGGGCTGACCGGGTTGGTTTTGATCTGATAAATGCACGCATCCCCCCCGC
GAAGGGGGTCAAGCGCCCGTCGGCATGTATTAACTCTAGAATTACCACAGTTATNCA
AGTAGGANANCAGCGAGCGACCAAAGGAACCNTACTGGATTAATGAGCCNTTTCCAG
TTTCACTGTACCGGNCGTGCNANTTAAACATGCATTGGNTTAATCTTTGAGACAAGC
ATATGCTANTGGCANGGTTTTTTTATGGNAAAGATGNTTTATTGGNGGCAGTACTAC
AAGGCATTAATATTGGTNCCCAAAAAAAAACTCGGTNTTATTAAATANTGGGCNTTA
ANACNTAATGAACTTGACCAACNNTTGCTGGATNNCTGANTCCTCCTGGTTTTTGGG
AAAGNAACCCACCACTATTTTTGGCANTCTTTTCNCCACTTGAAAANAAGGGGGTTT
NTNGGNGGCTTANTTCCNNCTTTAANCNGGAATTTTANCCCTNGAANNTTGTTTTCC
GAACTTTTTAAAA
BSK-1L2-2 - forward
AAGGGAAAGATGAAAAATTATAACCAAGCATAATATAGCAAGGACTAACCCCTATAC
CTTCTGCATAATGAATTAACTAGAAATAACTTTGCAAGGAGAGCCAAAGCTAAGACC
CCCGAAACCAGACGAGCTACCTAAGAACAGCTAAAAGAGCACACCCGTCTATGTAGC
AAAATAGTGGGAAGATTTATAGGTAGAGGCGACAAACCTACCGAGCCTGGTGATAGC
TGGTTGTCCAAGATAGAATCTTAGTTCAACTTTAAATTTGCCCACAGAACCCTCTAA
ATCCCCTTGTAAATTTAACTGTTAGTCCAAAGAGGAACAGCTCTTTGGACACTAGGA
AAAAACCTTGTAGAGAGAGTAAAAAATTTACCGCCGATACTGACGGGCTCCAGGAGT
CGTCGCCACCAATCCCAAGGGCGAATTCCAGCACACTGGCGGNCGTTACTAGTGGAT
CCGACTCGGTACCAAGCTTGATGCATAGCTTGAGTATTCTATAGTGCACCTAAATAG
CTTGGCGTAATCATGGNCATACTGTTCTGNGTGAAAATGGTATCCGTNACAATTTCA
CACACATACGAGCCGGAGC
BSK-1A2-5 - reverse
TCAAGAGGAGCAAGAAGTTAAAGTGGAAAGCAGGGCAATGGTCTTGGCAGCATTTGT
TCAGAGATCAACTGTATTATCAAAAAACAGAAGTAAATTTATTCAAGATCCAGAAAA
ATATGATCCATTATTCATGCACCCTGATCTGTCTTGTGGAACACACACTAGTAGCTG
TGGGCACATTATGCATGCCCATTGTTGGCAAAGGTATTTTGATTCCGTTCAAGCTAA
AGAACAGCGAAGGCAACAGAGATTACGCTTACATACGAGCTATGATGTAGAAAACGG
AGAATTCCTTTGCCCCCTTTGTGAATGCTTGAGTAATACTGNTATTCCTCTGCTGCT
TCTCCAAGAAATATTTTTAACAACAGGTTAAATTTTTCAGACCAACCAAATCTGACT
CAGTGGATTAGAACAATATCTCAGCAAATAAAAGCGGAATTCCAGCTGAGCGCCGGC
GCTACCATTACCAGTTGGTCTGGGGCAAAAATAATAATTACCGGGCAGGCCATGTCA
AGG
BSK-1C7-1 - reverse
GAAATGCATTCTTATGTTATACCAAAACACATATTCATAGTAGTTCTATTTATAGTT
GCCCCAAACTAGGTCAATCAAATCTTCAAAAAAAGTAAAATAGTTAATTCATGGTCA
CAAAACATACATATTTCATAATTTCATTTGTATAAACCTCAAAAGCAAAACCAATCT
ATGGTATTTCAAGTCAAGATTGTGGTTACCTTTAAGGGAGAAAATAGCAACTGGGAA
AAGGTATGAGGGGGGATTCTAGGGTGCTGGTAACGATCTGTTTCTTGATTTGGGTGC
TGGCTATATATGTTCACTATTCATTTTTTAAAAATAGACACAGGGTCTCACTATGTT
GCCCAGGCTGGCTTAAACTCTTGGCTCAAGCAGTCCTCCCACCTCGGCCTCCCAAAG
TGCCGAGATTACAGGTGTGAGCCACTGCCCCGGCCGAGATTTACTTTTATAATGACT
CTAATATTTAGCATTCAAAATTGTGAAAGGGGAGAAAGATTCTGAGAAATACAGAAT
CTAAAATGGGATTGNCTAAGTAATCTTTCATATTCATAAGTTGTAGNCTTAAATAAA
AAGGTTCATGTGGTANTACCAGGACATCANCCTCTGGTCATTCTGGCTGGATAATAT
AGATCTCAAATATATTAATTATTAGNCGGGCTTTACTCTGGTGATAANACTCNNAAN
GCTAATACTTTAAGNTGGNATTCCTTTCTGGTAATGGNACAGTCCCCAANTAAACCN
TTTTGNGCCANGGNCCACATTCNTACAGGGAAGGGAAAAANCCTTTTNTTAGNTCAA
TCCTAATCACTTTTCCCCAAATGGGGANNCTGCNTCCAAGGNNTAANNTTTTTTTNG
CCTTNNTTTNATNGGNGGNTTAAAAAANCCCCGGNNNGGTTTNGCCTTNGCCCGNAA
AANTTTTTTTTTNNAAAAANNCNNGTNTAAACCNTTTTTTTTTAAAAGGGANC
BSK-1E2-A2 - reverse
GTGTTGTGAATATTCAAAATCCTCTCTTCTAGCTGTTTGAAAATATACACTAAATTA
TTGTGAGCAATATTCAGGCTACCATGCTACAGAGCACTGAACTTTTTCCTCCCTAAC
AGCTGTAACTTTGTATCTGTTACCTCTGCCTATTCTCCTCTCCTCACTACCCTTCCC
AACCTCTAATGACCATGATTCTAGATTCTACTCTGTACTTCTATGAGCTCATTTTTT
TTTCAGCTTCCATATATGGGTGAGAACATGTGGTATTTATTCCAAGTTTATTTTTGT
ACACAAAAACTCAAAATTTGTGAACCACTGCCTGAGCAATCTCCCTCATTCTCACCA
TTTTAACTATTTATGATAGGCTTACAACCTAAAATTTTATCTCCAACTCTGCCTCTC
TCCTAAACTTCAGACTTCTACAGAATTGCTCTAGGTACCTTCACCTGTATCTACAGG
CACGAACTCACATAAACAAAATATGTTCTTCCCAAATTTACTCTTCTCTCTGGATAA
CTATTTCAACTAATAGTCTATCTTTCACCCTGGAGCCAGTCAGAAACCTG
BSK-1E2-B2 - reverse
CAGCACTTTGGGAGGCCGAGGTGGGGGTAATCACAAGGTCAGGAGATCAAGACCATC
CTGGCCAACATGGTGAAACCCCGTCTNTACTAAAATCCAAAAAAAAAAAAAATTAGC
CGGGCAAGGTGGCGCATGCCTGTAGTCCCAGCTACTGGACTACAGGCTGAGTCAGGG
AATCGCTTGAACCCCGGAGGTGGCGGTTGCAGTGAGCTGAGATCACTGCACTCCATC
CAGCCTGCTGACAGAGCGAGACTATGCCTCAAAAAAAAAANANAAAAANAANANAAA
ANAAAACNNAAAAAANAAAAAANAAAAACCAGTTGANCGCCGGNCGNTACCATTCCA
GGGGGTCTCCGGTCAAAAATANTAATANCCGGGCAGGCCATNTCAAGGGCGAATTNT
GCAGATATCCAT
BSK-1G13-A5 - reverse
GAAAGATGAAAAATTATAACCAAGCATAATATAGCAAGGACTAACCCCTATACCTTC
TGCATAATGAATTAACTAGAAATAACTTTGCAAGGAGAGCCAAAGCTAAGACCCCCG
AAACCAGACGAGCTACCTAAGAACACCTAAAAGAGCACACCCGTCTATGTAGCAAAA
TAGTGGGAAGATTTATAGGTAGAGGCGACAAACCTACCGAGCCTGGTGATAGCTGGT
TGTCCAAGATAGAATCTTACTTCAACTTTAAATTTCCCCACAGAACCCTCTAAATCC
CCTTGTAAATTTAACTCTTAGTCCAAAGAGGAACAGCTCTTTGGACACTAGGAAAAA
ACCTTGTAGAGAGAGTAAAAAAATTTA
BSK-1G11-A5 - reverse
GAGTTATGTTGTCTTTTATTAGCAGCGAATGTCATCACAGATTGGATAGTACATCCA
GGTGCAATGTCACCATCAGCAAGGTCAGCTTGACACTCAAGTGGAAGATTAGGGAAG
AATGACTAGGATAAAAAAAAAAGGAGGGCACCAAGGGAAAGGGATGATGGGGTGAGC
TGGCGAGTGTGGGTGGGAAATGAAATGTTTATTGAGGATCTGCTCTGTGCTGGGCAC
TTTAATCCACATTTTATCGTTTACTTTTCAAACAGATGCACCTTACCCCCACCCCAA
TGC
BSK-1G11-B5 - reverse
CACAGGAGGAGAAGCAGGAGCTGTCGGGAAGATCAGAAGCCAGTCATGGATGACCAG
CGCGACCTTATCTCCAACAATGAGCAACTGCCCATGCTGGGCCGGCGCCCTGGGGCC
CCGGAGAGCAAGTGCAGCCGCGGAGCCCTGTACACAGGCTTTTCCATCCTGGTGACT
CTGCTCCTCGCTGGCCAGGCCACCACCGCCTACTTCCTGTACCAGCAGCAGGGCCGG
CTGGACAAACTGACAGTCACCTCCCACAACCTGCAGCTGGAGAACCTGCGCATGAAG
CTTCCCAAGCCTCCCAAGCCTGTGAGCAAGATGCGCATGGCCACCCCGCTGCTGATG
CAGGCGCTGCCATGGGAGCCCTGCCCAGGGGCCCATGCAGAATGCCACCAAGTATGG
CAACATGACAGAGGACCATGTGATGCACCTGCTCCAGAATGCTGACCCCCTGAAGGT
GTACCCGCCACTGAAGGGGAGCTTCCCGGAGAACCTGAGACACCTTAAGAACACCAT
GGAGACCATAGACTGGAAGGTCTTTGANAGCTGGATGCACCATTTGGCTTCTGTTGA
AATGAGCANGCACTTCTTTGGACAAAAGCCCACTTGACGCTTCANCGAAGAGTCACT
TGGAACTGGAGGACCGTCTTTNGGCTGGTGTGACCAACAGGATCTGGGCCAATNCCC
ATTGAAACAACANAAGCGGCTTTAAAATCTTGCGGGCCCANAAAGTTCAANTTTNTT
GGTTCCTTAGGCCCAANCCTTCCCAATTTTCNACTTGGNCCTAATCCATGAAAACTG
GNGCNNGGTNTTTNTNANCCTTGGNAAGAAAAACAATTGGAACANCGATAACATGCN
NAAGGCCTNGTCGCCAAATTCTTTTTAANANGGGCTAGGGCCCNAAANGGCAAAATT
NAAAAACCCTNNTGAATAAAANATTTAANAAAGGTNANGGTTNGTNTTGNCAAATGG
AANGCCCNGNAAGGGAACCTCCCCNACCNANNGGANNTGNANGNTTCCNCAANTGGC
TT
BSK-1H13 - reverse
CGGAGTTCCGGGTATCTGGGCTCCAGGCAGAAGCACAGCCTCCCCGACCTGCCCTAC
GACTACGGCGCCCTGGAACCTCACATCAACGCGCAGATCATGCAGCTGCACCACAGC
AAGCACCACGCGGCCTACGTGAACAACCTGAACGTCACCGAGGAGAAGTACCAGGAG
GCGTTGGCCAAGGGAGATGTTACAGCCCAGATAGCTCTTCAGCCTGCACTGAAGTTC
AATGGTGGTGGTCATATCAATCATAGCATTTTCTGGACAAACCTCAGCCCTAACGGT
GGTGGAGAACCCAAAGGGGAGTTGCTGGAAGCCATCAAACGTGACTTTGGTTCCTTT
GACAAGTTTAAGGAGAAGCTGACGGCTGCATCTGTTGGTGTCCAAGGCTCAGGTTGG
GGTTGGCTTGGTTTCAATAAGGAACGGGGACACTTACAAATTGCTGCTTGTCCAAAT
CAGGATCCACTGCAAGGAACAACAGGCCTTATTCCACTGCTGGGGATTGATGTGTGG
GAGCACGCTTACTACCTTCAGTATAAAAATGTCAGGCCTGATTATCTAAAAGCTATT
TGGAATGTAATCAACCGGAATTCCGTTTTTTTTTTTCTCATTTAACTTTTTTAATGC
GCTCAAAATTCTGNGACAAANTTTTGGCAAGTGTTTCCATTAAAAAGTNTGATTTAA
AACTAATACTTAAAATTGCNCACCCNAAAANGGAAAACCAAGTGGTCCCAAACATTC
TCTTTCTTNTAAGGTTACANGCNTGGTNTATTAACCACTTTTCTCTAACTTAANGCC
ATTGAACAACATTTTAAACGTTTCNCCNGTTAAAANGGGGGGNGGTTNGGGNAAATN
NTTACCTTTGACTTTTGGNNAANTTGGGACTTCNNTTCNAACTTTTTCCNGGTTTNA
CCCCCCAANGNGGTTTTC
BSK-1I2-A2 - reverse
ACTCCGGTCTGAACTCAGATCACGTAGGACTTTAATCGTTGAACAAACGAACCTTTA
ATAGCGGCTGCACCATTGGGATGTCCTGATCCAACATCGAGGTCGTAAACCCTATTG
TTGATATGGACTCTAGAATAGGATTGCGCTGTTATCCCTAGGGTAACTTGTTCCGTT
GGTCAAGTTATTGGATCAATTGAGTATAGTAGTTCGCTTTGACTGGTGAAGTCTTAG
CATGTACTGCTCGGAGGTTGGGTTCTGCTCCGAGGTCGCCCCAACCGAAATTTTTAA
TGCAGGTTTGGTAGTTTAGGACCTGTGGGTTTGTTAGGTACTGTTTGCATTAATAAA
TTAAAGCTCCATAGCGTCTTCTCGTCTTGCTGTGTCATGCCCGCTCTTCACGGCAGG
TCAATTTCACTGGTTAAAAGTAAGAGACAGCTGAACCCTCGTGGA
BSK-1I2-B5 - reverse
CATTTTCGTTGGTGGTGTTCAGTTGTGGCGGTTGCTGGTCAGTAACAGCCAAGATGC
TGCGGAATCTGCTGGCTCTTCGTCAGATTGGGCAGAGGACGATAAGCACTGCTTCCC
GCAGGCATTTTAAAAATAAAGTTCCGGAGAAGCAAAAACTGTTCCAGGAGGATGATG
AAATTCCACTGTATCTAAAGGGTGGGGTAGCTGATGCCCTCCTGTATAGAGCCACCA
TGATTCTTACAGTTGGTGGAACAGCATATGCCATATATGAGCTGGCTGTGGCTTCAT
TTCCCAAGAAGCAGGAGTGACTTCAGTCATCCCAGCAATCGCTTGCTTCAGTTTCAT
TCAGCTCTCTATGGACCAGTAATCTGATAAATAACCGAGCTCTTCTTTGGGGATCAA
TATTTATTGACTTGTAGTAACTGCCACCAATAAAGCAGTCTTTACCATAAAAAAAAA
CCTGCCAGTAGCATATGCTTGNCTCAAAGATTAAGCCATGCATGTCTAAGTACGCAC
GGCCGGTACAGTGAAACTGCGAATGGCTCATTAAATCAGNTATTGGGTCCTTTGGTC
GCTNGCTCCTCTCCTACTTGGATACTGNGGTAATTCTAAACTAATACATGCCGACGG
GCGCTTACCCCTTNGCGGGGGGGATCCTGCATTTATANATCAAACCAACCCGGNAAG
CCTTTTCGGCCCGGCCGGGGGCGGCCNCCGGNGNTTTTGGNGACTTTAANAACCTTN
GGCCCAANGACCCCCCCNNGGGGGGA
BSK-1L2-2 - reverse
TTTTTACTCTCTCTACAAGGTTTTTTCCTAGTGTCCAAAGAGCTGTTCCTCTTTGGA
CTAACAGTTAAATTTACAAGGGGATTTAGAGGGTTCTGTGGGCAAATTTAAAGTTGA
ACTAAGATTCTATCTTGGACAACCAGCTATCACCAGGCTCGGTAGGTTTGTCGCCTC
TACCTATAAATCTTCCCACTATTTTGCTACATAGACGGGTGTGCTCTTTTAGCTGTT
CTTAGGTAGCTCGTCTGGTTTCGGGGGTCTTAGCTTTGGCTCTCCTTGCAAAGTTAT
TTCTAGTTAATTCATTATGCAGAAGGTATAGGGGTTAGTCCTTGCTATATTATGCTT
GGTTATAATTTTTCATCTTTCCCTTGCCGAAATTCC
BSK-1K9-A3 - forward
ATGTAAGTAAGTGTATTATGGCCAGTTAAGGTAGGCACTATAAAAATAGGCCGAAAA
GTTTAGAATATTCCTTTTTTACTGTAGTCTGTTTTTTAAAATTTGAAACTTGTTAGA
GAGTTTGGAAAACAGTCTTCTTCCTCCCACTCCACTTCCTGCCAAAAAAGAGGGGAA
GCACAATCGTCTTCAAAAAAGGTGATAAAGTAAATGCATATTATAAAATATTTTAAA
CTTTTGTGTGTGTGGTTTCACGTACAGGAAATGAACATGCAAATTCTTAGAAACTGT
TGTCACTGTGTTTCTGAAATGCTAAAAAAAATTATGCTTTGAGCTACCTGCTGCTTA
TAATTCCTTTCCCTGAATAGGTAGGTTTTTATAGTTAACAAATTTTAAATGTAAGTT
GATTTTGATAGTACTATTTCATTATGCAATCTGGAGAGGAGAGAAGTGTTTTTCATA
AAGTGGATATTAATTACAACTTTNAAAAGCCAATCAGTAAACATTCATTGATCTTGN
AATAACTGNGACCCTAATTAAAAGGGTGCTAGGCTTGTATGCTTGGAAATATTTGAA
ATTTTTATTNTTAAAACTGGG
BSK-1K9-A3 - reverse
CAGATTTTAAAGAATAAAAAAATTTCAAATATTTTCCAGACATAACAGCCTAGCAAC
CATTTTAATTAGGTGTCACAGTTAATTACAAGATCAATGAATGTTTACTGATTGGCN
TTTTAAAGTTGTAATTAATATCCACTTTATGAAAAACACTCTCTCCTCTCCAGATTG
CATAATGAAATACTACTATCAAAATCAACTACATTTAAAATTTGTTAACTATAAAAA
CCTACCTATTCAGGGAAAGGAATTATAAGCAGCAGGTAGCTCAAAGCATAATTTTTT
TTAGCATTTCAGAAACACAGTGACAACAGTTTCTAAGAATTTGCATGTTCATTTCCT
GTACGTGAAACCACACACACAAAAGTTTAAAATATTTTATAATATGCATTTACTTTA
TCACCTTTTTTGAAGACCATTGNGCTTNCCCTCTTTTTTGGCCAGGAAGTGGGAGTG
GGAGGAAGAANACTGTTTTCCAACTCTTAACAGGTTCAAATTTTAAAAAACAGACTA
CNGTAAAAANGGATATTCTAAACTTTCGGNCTATTTTATAGGCCTACCTAACTGGCC
TAATCCTTACTACATNGGATTCCNCTGANCGCCG
BSK-2C5-C3 - forward
AGAATCTGGTGACTTCAGTTGAGCCCCCAGCAGAGGTGACTCCATCAGAGAGCAGTG
AGAGCATCTCCCTCGTGACACAGATCGCCAACCCGGCCACTGCACCTGAGGCACGAG
TGCTACCCAAGGACCTGTCCCAAAAGCTGCTAGAGGCATCCTTGGAGGAACAGGGCC
TGGCTGTGGATGTGGGTGAGACTGGACCCTCACCCCCTATTCACTCCAAGCCCCTAA
CGCCTGCTGGCCACACCGGCGGCCCAGAGCCCAGGCCTCCAGCCAGAGTAGAGACTC
TGAGGGAGGAGGCGCCCACAGACTTACGGGTGTTTGAGCTGAACTCGGATAGTGGGA
AGTCTACACCCTTCAACAATGGAAAGAAAGGCTCAAGCACGGACATTAATGAGGACT
GGGAAAAAGACTTTGACTTGGACATGACTGAANAGGAAGTGCANATCGCACTTTCCA
AGTGGATGCCTNCNGGGAGCTNGAAAATTAAAATGGGAAGACTGGGAATGAGGGACC
NNAAGGAGCANTTCCCCCCCATGGGATNTTTTGCTTCCTNCTNGNTTAANCCANCCT
GGATGAATGAAAATGTTCCCCAAATTCTTTGCAACCAAACTTTGGCACAAATTTGGG
GGTNCTTGTTGGCCTTTTGGNCTTTGTTNACCNGGAAGGGTTTTANTCCGGCCAAAA
TTTTATTTGCCNCATTGGNGACCCNGGGGAGGAACTNTCTCTNCCNAAAACGGTTTT
TNTNAACCNTGTTCTTANGATNTTTTGAACCNAGGAATTTNCCTTTCTGTNAAAAAA
NAACCCNNTTTTNNGAANNGNAANTNTTNNTTTTNNNGGGGGGGGNNCCCTCCTTGT
AAAAG
BSK-2C5-C3 - reverse
AAAGCAAGGAGGTGGGTCAGGGTTTGGTCTCTGGATTCTGAACCCCAAAGGAGCCTT
TCCAGGAATGGAAAATGCCTGGGAGGGGGAGAGTCCCAAGAGAGGCAAATTTCCCAG
AGATAAGTGCCTCTTACCCACTGGGATAGGAACCAAAATGTGTTCACTGTCCCTGTT
TAGCCAAGGGTAGGTGGCATGGCCCTCCCTGCCTGCTTATGTATGGACAGAGTATGT
TGTCTCAGCTTCCTCCGAGAGAGACTGGTGGTTTAGCTTCTGTCTACACAGGCAGAA
GGGCTAGAACTATCCCTTGGGACTTTCCAGCAGGAGTCCTCANGAACAGTGGGTGTT
CANCAGAAAAACACANGCTCTTCTGGTGAGGAGGATAGGTTTCCTCTTCCTTGGGTC
ATCCTATTGTTGGCACAAGTCAAAGTTTTTGGCCGGGATTTANAAAGCCCCTTCCAG
GTGTGAGCANAAGCCCAAAANGGCCANCAGGGAACCCCAAATTGTCCCAAACTTTTG
TTGCAAAAGANATTTGGGGGAACATTNTCANTCATTCAGGCTGGCTTANACAACCAN
GGANGCAAAAATGCCTTGGTGGGGGAGNTGTTCCTTTGGNTTCCTTATTCCANNNCT
TCCATTTTAATTTTNAACTTCCCGGAGNATCCCTTTTGNAAGNCCNTTTCNCCTCTT
TTNATCATTTNCAANNAAANNTTTTTCCANCCTACTNTNTCCCGCTTAACCTTTTTT
NTTNTTGGNGGGGGNNATTCCCTTTCNNTTANTTAAAAACCCNANTTNNGGCCCNCN
CCTCAANTTTTTTTNTTAACCTNNNTTTGNCCCCNTGNCCNANCNTNGGCTNGATAA
ATNGGGNGGGNNATTTNCCCATNCNACANNCTNTTTTANNATTT
BSK-2G9-D3 - forward
ATCCCAGGAAAATTTGGAGGAACAGCTGCTCTCCACTGGCCTGCTCCTGCAAGAATG
CCCTGGAGCTTCTGAAGAAGGATCTATATTTACCTTATAGGGCCTTAAGTCCTGGGA
TGGAACTATATACTTTGGCCGCGATGATGTGGCTTTGAAGAACTTTGCCAAATACTT
TCTTCACCAATCTCATGAGGAGAGGGAACATGCTGAGAAACTGATGAAGCTGCAGAA
CCAACGAGGTGGCCGAATCTTCCTTCAGGATATCAAGAAACCAGACTGTGATTGACT
GNGAGAGCCGGGCTGAATGCAATGGAGTGTGCATTACCATTTNGGAAAAAAAATGTG
AATCANTCACTTACTGGGACCTGNACAACTNGCCAACTGACAAAAATGACNCCCATT
TGTGTGACTTTATTNGANANCATTACCTGGAATGANCCGGTGAAAAACCCTTNAAAG
AANTTTGNCTGACCACATTTCNCAAAATTNCACANNAATNGNANGCCCCCCGNATAT
GGCTTGNATAGGAATANTCNTTTNTGACAAGCACACCCT
BSK-2G9-D3 - reverse
GGGTACCAAATTTCTTTATTTGAAGGAATGGTACAAATCAAAGAACTTAAGTGGATG
TTTTGGTACAACTTATAGAAAAGGTAAAGGAAACCCCAACATGCATGCACTGCCTTC
GTGACCAGGGAAGTCACCCCACGGCTATGGGGAAATTAGCCCGAGGCTTANCTTTCA
TTATCACTGTCTCCCAGGGTGTGCTTGTCAAAGAAATATTCCGCCAAGCCANATTCG
GGCCCTCCCATCTTCCGCAAGTTGGTCACCGTGGTCACCCAATTCTTTGATGGCTTT
CACCTGCTCATTCANGNAATGNGNCTCAATGAAGTCACACAAATGGCCGNCATTTTT
CTCAGTGGCCACTTTGGGCANNTNCAGTANTCACTGATTNACATTTTTTTTCCAATG
GAATGNACACTTCATTGNATTNANCCNNTTTTCCANCATTAAAANNTGGGTTNTTGA
TATNCTNAAGAAAAATNGGCCCCC
BSK-2K13-A4 - forward
AGAAATTGAAACCTGGCGCAATAGATATAGTACCGCAAGGGAAAGATGAAAAATTAT
AACCAAGCATAATATAGCAAGGACTAACCCCTATACCTTCTGCATAATGAATTAACT
AGAAATAACTTTGCAAGGAGAGCCAAAGCTAAGACCCCCGAAACCAGACGAGCTACC
TAAGAACAGCTAAGAGAGCACACCCGTCTATGTAGCAAAATAGTGGGAAGATTTATA
GCTAGAGGCGACAAACCTACCGAGCCTCGTGATACCTCGTTGTCCAAGATACAATCT
TAGTTCAACTTTAAATTTGCCCACAGAACCCTCTAAATCCCCTTGTAAATTTAACTG
TTAAGTCCAAAGAGGAACAGCTCTTTGGACACTAGGAAAAAACCTTGTAGAGAAGAA
GT
BSK-2K13-A4 - reverse
GTTAAATTTTTTACTCTCTCTACAAGGTTTTTTCCTAGTCTCCAAAGAGCTGTTCCT
CTTTGGACTAACAGTTAAATTTACAAGGGGATTTAGAGGGTTCTGTGGGCAAATTTA
AAGTTGAACTAAGATTCTATCTTGGACAACCAGCTATCACCAGGCTCGGTAGGTTTC
TCGCCTCTACCTATAAATCTTCCCACTATTTTGCTACATAGACGGGTGTGCTCTCTT
AGCTGTTCTTACGTAGCTCGTCTGGTTTCGGGGGTCTTAGCTTTGGCTCTCCTTGCA
AAGTTATTTCTAGTTAATTCATTATGCAGAAGGTATACGGGTTAAGTCCTTCCTATA
TTATGCTTGGGNTATAATTTTTCATCTTTCCCTTGCGGNACTATATCTATTGCCCCA
GGTTTCAATTTCT
BSK-2K13-C2 - forward
CAAACCCACTCCACCTTACTACCAGACAACCTTAGCCAAACCATTTACCCAAATAAA
GTATAGGCGATAGAAATTGAAACCTGGCGCAATAGATATAGTACCCCAAGGGAAAGA
TGAAAAATTATAGCCAAGCATAATATAGCAAGGACTAACCCCTATACCTTCTGCATA
ATGAATTAACTAGAAATAACTTTGCAAGGAGAGCCAAAGCTAAGACCCCCGAAACCA
GACGAGCTACCTAAGAACAGCTAAAAGAGCACACCCGTCTATGTAGCAAAATAGTGG
GAAGATTTATAGGTAGAGGCGACAAACCTACCGAGCCTGGTGATAGCTGGTTGTCCA
AGATAGAATCTTAGTTCAACTTTAAATTTGCCCACAGAACCCTCTAAATCCCCTTCT
AAATTTAACTGTTAGTCCAAAGAGGAACAGCTCTTTGGACACTAGGAAAAAACCTTG
TACAGAGAGTAAAAAATTAACACCCATAGTAGGCCTAAAAC
BSK-2K13-C2 - reverse
GCTTTTAGGCCTACTATGGGTGTTAAATTTTTTACTCTCTCTACAAGGTTTTTTCCT
AGTGTCCAAAGAGCTGTTCCTCTTTGGACTAACACTTAAATTTACAAGGGGATTTAG
AGGGTTCTGTGGCCAAATTTAAAGTTGAACTAAGATTCTATCTTGGACAACCAGCTA
TCACCAGGCTCGGTAGGTTTGTCCCCTCTACCTATAAATCTTCCCACTATTTTGCTA
CATACACGGGTGTGCTCTTTTAGCTGTTCTTAGGTAGCTCCTCTGGTTTCGGGGGTC
TTAGCTTTGGCTCTCCTTGCAAAGTTATTTCTACTTAATTCATTATGCAGAAGGTAT
AGCGGTTAGTCCTTGCTATATTATGCTTGGCTATAATTTTTCATCTTTCCCTTCCGG
NACTATATCTATTGCGCCAGGTTTCAATTTCTATCGCCTATACTTTATTTGGGTAAA
TGGTTGGCTAACGNTGCTGGTANTAACGNGGAGTGGGTTTG
BSK-1E15 - forward
AGATCCTTATGCCCGAGTTCCGGTACAGGAACGTCGGTCATCCAGATGCCCTCTTCC
GCTTTCAGTTTGGATAACGCTTTCATCTCACATCCTCAGGCGATAACGCCCAGTTGT
TTACCAATACGCGTAAATGCTTCTACTGCACGCGTAATTTGCTCAGGGGTATGCGCC
GCAGACATCTGCGTACGAATACGCGCCTGACCTTTCGGAACGACCGCATAGAAGAAA
CCGGTAACGTAAATGCCCTCTTTTTGCAGCTCACGGGCAAATTTCTGCGCCACTACC
GCATCACCAAGCATGACCGGAATAATGGCGTGATCGGTTCCGCAGGGTAAAGCCCGC
CGNCGACATTTCCTCACGGAACTGACGCGCGTTCGCCACAGACGGTCACGCAGTTCG
CTGCCCGCTTCGACCATCTTCAGTACTTTGATGGACGCCGNAACAATGGNCGGTGCC
AGCGAATTTGGAGAACANGTACNGACCAANAACCTTGGCGCAAGCCACTCAANCACT
TTTTTTGCGCGCCCGCGGNATAACCCCCCAGAAGCCCCGGNCCAANGCTTTTACCAA
GCGTACCCGGNGATAATATTTGAACCCGGGCCATTAANATTGCAANNTTTATTGGGA
ACCNCGAACATTTTTAACCGNCAAAAACCAACCCCNTNGGAAATNTTNGCCNCCAAT
TCCCANGGGGGAAATTTTNGNAAATTCNTTNAAACTGGGGGGCCGTTTAACATGCCT
TTTAANGGGCCCAATTNNCCCNTTANGGGGCGNTTACAAATNACTNGGCCGGNNTTT
TNAAACNNNNGAATNGGGNAAACCCGGGGGTTCCCAACTTAAA
BSK-1H13 - reverse
CATTGATTGAATAGTTATAAAGATGTTATAGTAAATTTATTTTATTTTAGATATTAA
ATGATGTTTTATTAGATAAATTTCAATCAGGGTTTTTAGATTAAACAAACAAACAAT
TGGGTACCCAGTTAAATTTTCATTTCAGATAAACAACAAATAATTTTTTAGTATAAG
TACATTATTGTTTATCTGAAATTTTAATTGAACTAACAATCCTAGTTTGATACTCCC
AGTCTTGTCATTGCCAGCTGTCTTGGTAGTGCTGTGTTGAATTACGGAATAATGAGT
TAGAACTATTAAAACAGCCAAAACTCCACAGTCAATATTAGTAATTTCTTGCTGGTT
GAAACTTGTTTATTATGTCAAATAGATTCTTATAATATTATTTAAATGACTGCATTT
TTAAATACAAGGCTTTATATTTTTAACTTTAAGATGTTTTTATGTGCTCTNCAAATT
TTTTTTACTGGTTCTGATTGNATGGAAATATAAAAGTAAATATGAAACATTTAAAAT
ATAATTGGTGGGGCATTTTTAATTAAGNTTGGTTTATTTAAGNTTAAGGTAATTCCA
TGCTGGGGTTCANTAGAACATTCCGAATCTGGATCTGNGGNTCCAGCAGATATTCCN
NANTACAAATTANCTTCAAGTCCCCTTCTGGACCAAAAAGGTNACCACCAANGANGG
GAGGAATNAAGGGGAA
BSK-1F14 - reverse
CCAGNTGACCNCCGGNCGTTACCNTTACCAGTNGGTNTGGNGTNAAAAATAATANTA
ACCGGNCAGGCCNTNTNANGGGCAAATTNTGNAAATNTCCNTNANANTGGCGGCCGT
TCNANCNTGCNTTTAAAGGGCCNANTTCNCCNTATAGGGAGTCGTNTTANANTTNAN
TGGCCGTNGTTTNANAACGTCGNNANTGGNAAAACCNTGGNGTTACCCAA
BSK-1H13 - forward
CGGTATTCCGAAAAAATGTTTCCAACTCCGCTGAAATGTTGCTGAAAAGCATGGTGC
TGGTAACAGTTCAACAATCCGTGGCTGCTCATTCTTGCCTACTTTACTCTCCCACTG
AAGCAGGTTAGCGTTGAAGGTGGTATGGAAAAGCCTGCATGCCTCTTCAATTCTTTT
GTTTCTTCTCCTTCCCCCTCCCCCTACCTCCTTCCCCTCACTCCTCCCCTCCTTCGC
TCGCTCAACCTCTTTTGTTCAGTATGTGTAACTTGAAGCTAATTTGTACTACTGGAT
ATCTGACTGGAGCCACAGATACAGAATCTGTATTGTTCTTACTGAAACACAGCATGG
AATTAACATTAAACTTAAATAAAACAAACCTAAATTAAAAATGCCCAACAAATTATA
TTTTAAATGTTTCATATTTACTTTTATATTTCCATACAATCAGAAACAGTAAAAAAA
ATTTGGAGAGCACATAAAAACATCTTAAAGTTAAAAATATAAAGCCTTGTATTTAAA
AATGCACTCATTTAAATAATATTATAAGAATCTATTTGNACATAATAAACAAGTTTC
AACCAGCAAGAAATTACTAATATTGACTGTGGAGTTTTGGCTGGTTAATAGTTCTAA
CTCANTATTCCGTAATCAACACAAGCACTACCAACACAAGNTGGCAATGACAAGAAT
GGGAAGTNTCAAACTAGGATGGTAAGTCAATTAAAANTTCAGATAACCATAATGNAC
TTATACTAAAAAATTATTTTGGGGGTTATTTGAAAANGAAAATTAACTGGGGGNCCC
AATTGGTTGGTTGGGTAAATTTAAAACCCNGGTTGGAAATTATCTAATAAACNTTCN
TTNAATACTNAAAAAAAATAAATTNCCTTACCACTTTTTACCNTTTCATNAAGGGGG
AATTCNATTAACCCCGNGGTTNCATTTNCAATGGGGTGGGGGGC
BSK-1E3 - forward
GAGGCNCAGGTGGGGGTNNTTACANNGTNATGATGATTAATNACCATTCTGNCCAAC
ATGGTNAANCCCNGTNTCTACTAAAATCCAAAAANNNNAAAATTAGCCGGNCAAGGT
GGNGCATGCCTGTAGTCCCAGCTACTGGACTACAGGCTGANTNAGGGAATCCCTTGA
ACCCGGNAGGTGGCGGTTGCAGNGANCTGAGATCACTGCACTCNATCCAGNCTGCTG
ACANATCNAGACTATGCCTCAAAAAANGGGGTTTAACCATNTTGNCCNAAAAGGNNT
TNANANCCTAANCTTGNNAAAACCCCCNTGATGGCCGTTC
BSK-1F14 - forward
CCNANNCTGACGGGNTCNANNANTNGNCCCCNCCAATCCCANGGGCAAATTCCANCN
NNCTGGNGGCCGTTACTAGGGGANCCNANCTNGGNNCCAANNTTGANNCANANNTNG
NGTNTTNNANAGGGGCNCCNAAANANNTNGGNGNAANCANGGNCANANCTGTTNCCT
GGGGAAAATTGTNNTCCNNTNANAATTCCNCNCAANNTACNACCCGGAANCNTAAAG
GGTAAA
BSK- 1E15 - forward
GGTTCCCATGAATACTGCGATGTGATGGGCCGGGTCGATATTATCACCGGTACGCTT
GGTAAAGCGCTGGGCGGGGCTTCTGGTGGTTATACCGCGGCGCGCAAAGAAGTGGTT
GAGTGGCTGCGCCAGCGTTCTCGTCCGTACCTGTTCTCCAACTCGCTGGCACCGGCC
ATTGTTGCCGCGTCCATCAAAGTACTGGAGATGGTCGAAGCGGGCAGCGAACTGCGT
GACCGTCTGTGGGCGAACGCGCGTCAGTTCCGTGAGCAAATGTCGGCGGCGGGCTTT
ACCCTGGCGGGAGCCGATCACGCCATTATTCCGGTCATGCTTGGTGATGCGGTAGTG
GCGCAGAAATTTGCCCGTGAGCTGCAAAAAGAGGGCATTTACGTTACCGGTTTCTTC
TATCCGGTCGTTCCGAAAGGTCAGGCGCGTATTCGTACCCAGATGTCTGCGGCGCAT
ACCCCTGACAAATTACGCGTGCAGTAGAAGCATTTACGCGTATTGGTAAACAACTGG
GCCGTTATCGCCTGAGGATGTGAGATGAAAGCGTTATCCAAACTGAAAAGCGGAAGA
GGCATTTTGGATGACCGACGTTCTGTACCGGAACTCGGCATAACGAATCTGGTTGAT
TAAAAGTCCGTAAACAGCCATTNTGCGGGAATGACGTTCACATTTATAACTGGGGAT
AAGTCTNGCNCCAATNCCAAGG
BSK-1A11-A3 - reverse
CCGGCCCGTCTCGCCCGCCGCGCCGGCGAGGTGGAGCACGAGCGCACGTGTTAGGAC
CCGAAAGATGGTGAACTATGCCTGGGCAGGGCGAAGCCAGAGGAAACTCTGGTGGAG
GTCCGTAGCGGTCCTGACGTCCAAATCGGTCGTCCGACCTGGGTATAGGGGCGAAAG
ACTAATCGAACCATCTAGTAGCTGGTTCCCTCCGAAGTTTCCCTCAGGATAGCTGGC
GCTCTCGCAGACCCGACGCACCCCCGCCACGCAGTTTTATCCGGTAAAGCCAATGAT
TAGAGGTCTTGGGGCCGAAACGATCTCAACCTATTCTCAAACTTTAAATGGGTAAAG
AAGCCCGGCTCGCTGGCGTGGAGCCGGCGTGGAATGCNANTGCCTAATGGGCCACTT
TTGGTAAGCANAACTGGCGCTTGGGGATGAACCGAACGCCGGGTTAAGGGGCCCGAT
GCCGACCTCAT
BSK-1D8-B3 - forward
AAGGAATCGTATCGTATGTCCGCTATCCAGAACCTCCACTCTTTCGACCCCTTTGCT
GATGCAAGTAAGGGTGATGACCTGCTTCCTGCTGGCACTGAGGATTATATCCATATA
AGAATTCAACAGAGAAACGGCAGGAAGACCCTTACTACTGTCCAAGGGATCGCTGAT
GATTACGATAAAAAGAAACTAGTGAAGGCGTTTAAGAAAAAGTTTGCCTGCAATGGT
ACTGTAATTGAGCATCCGGAATATGGAGAAGTAATTCAGCTACAGGGTGACCAACGC
AAGAACATATGCCAGTTCCTCGTAGAGATTGGACTGGCTAAGGACGATCAGCTGAAG
GTTCATGGGTTTTAAGTGCTTGTGGCTCACTGAAGCTTAAGTGAGGATTTCCTTGCA
ATGAGTAGAATTTCCCTTCTCTCCCTTGTCACAGGTTTAAAAACCTCCAGCTTGTAT
AATGTAACCATTTGGGGTCCCGCTTTTACTTGGACTANTGTAACTCCTTCGTGCCAT
AAACTGAAACAGCCATGCTGCTATCTT
BSK-1D8-B3 - reverse
CTGAAAACAAGTTTTATTTAAATAAGGGTTTAAATACATTACACATAACATTAAAAC
TGAAGGGGAAAAAAAAACCAAAAACCAGTTTGTTACTTCACATGCCATTGGGCAGCT
GCTGCTATTAAGTTGCAAGCTCTACAGCTAGCTACATGACTGATGGATCAGTTTGAG
ATTTGTTCCCTTGTCAAAAGTTTAACTCTGATAGAAGGTTGGCCTCACATTCTGATG
TTTGGACATCCCTTAGCTAGGATATGTCTGGTCGAACAGACCTTTGTGGCAAGCCAG
ATGTCCTATCACCTCGCTAGCGGTAAGAGGGCCTCTTTGAGCTCTGTCCACCTAGTC
AGGTTGGAGACACCAGGGGATCTACCACCAAAAGCTCCCTTNTAGTAGTACAGCTGG
GCTTCTGCCTTACCCCATCCTCTCCTTTTAAAATTCACCGANGACTGTTCANGTGGT
AACATTCTTTANGGTANGGAACTCTTGNAAANGGAGAGCTGAGGAGGTTCCCGCCAG
BSK-1D9-A11 - forward
GTGGAGTCTGACTTAGCAAGCCTCGGGTGGGTTTGAGGGTCAAATTTCTACCAGGCT
TATATCCCTGGTGATGCTGCAGAATTCCAGGACCACACTTGGAGGTTTAAGGCCTTC
CACAAGTTACTTATCCCATATGGTGGGTCTATGGAAAGGTGTTTCCCAGTCCTCTTT
ACACCACCGGATCAGTGGTCTTTCAACAGATCCTAAAGGGATGGTGAGAGGGAAACT
GGAGAAAAGTATCAGATTTAGAGGCCACTGAAGAACCCATATTAAAATGCCTTTAAG
TATGGGCTCTTCATTCATATACTAAATATGAACTATGTGCCAGGCATTATTTCATAT
GACAGAATACAAACAAATAANATAGTGATGCTGGTCAGGCTTGGTGGCTCATGCCTG
TATTCCCTAAACTTTGGGAGCCTAAGGNGANAACTCCTTGAACTCCTAAGGCCNGGA
ATTCAAGACCACCTGGATAACATANCAAGACCCCTTCTNTCCNAAAACCAAACCCAA
CCAANCANNANTGAAANGGG
BSK-1D9-B1 - forward
CTTGGGATTGGTGGCGACGACTCCTGGAGCCCGTCAGTATCGGCGGAAAACCGGCCAGA
GGCTGTTCACCTTGGAGACCTGCTGCGGATATGGGTACGGCCCGGCGCGAGATAAACACC
CTCTCCCCCGGATTTTCAGGGGCCAGCGAGAGCTCACCGGACGCCGCCGGAACCGCGAC
GCTTTCCAAGACACGGGCCCCTGTCTCGGGGCGAACCCATTCCAGGGCGCCCTGCCCTTC
ACAAAGAAAAGAGAACTCTCCCCGGGGCTCCCGCCGGCTTCTCCGGGATCGGTCGCGTT
ACCGCACTGGACGCCTCGCGGCGCCCATCTCCGCCACTCCGGATTCGGGGATCTGAACCC
GACTCCCTTTCGATCGGCCGAGGGCAACGGAGGCCATCGCCCGTCCCTTCGGAACGGCGC
TCGCCCATCTCTTAGGAGCGACTGACCCATGTTCAACTGCTGGTTCACATGGAACCCTTCT
TCACTTCGGCCTTCAAAAGTTTTCGTTTGAATATTTGCTACTACCACCAAGATCTGNACCT
GCGGGGGTTCCACCCGGGCCCGCGCCCTANGCTTTAAAGGTTNACCGNAACGGGCCTTCT
ACTTNTCGCGGNGTAACGTCCCCNGGGCTTCCGGGGCGGGGAGCGCGGAATTTCAACTG
ACGCCGGTCGCACCATTACCAANTGGTCTGGNGGCAAAAATAANATAACCGGGCAGGCC
TGTNAACCCAATTCAACAAATGGGGGCCGTNCTATGGATCCCAACTCGGNCCAACTTGA
NCATANTTGNGNTTTTTANGGANCNAAAANCTTGGNGAANNANGGNAAACTTTTCTTGN
GGAATGGTNTCGTTCAATNCCCAANAACAACCGAACTAAAGNGAAACCGG
BSK-1E2-C24 - forward
GCCGAGGATGGCCGTCATGGCGCCCCGAAGCCTCGTCCTGCTACTCTCGGGGGCCCTGGC
CCTGACCCAGACCTGGGCAGGCTCCCACTCCATGAGGTATTTCTCCACATCCGTGTCCCG
GCCCGGCCGCGGGGAGCCCCGCTTCATCGCCGTGGGCTACGTGGACGACACGCAGTTCG
TGTGGTTCGACAGCGACGCCGCGAGCCAGAGGATGGAGCCGCGGGCGCCGTGGATAGAG
CAGGAGGGGCCGGAGTATTGGGACGAGGAGACAGGGAAAGTGAAGGCCCACTCACAGA
CTGACCGAGAGAACCTGCGGATCGCGCTCCGCTACTACAACCAGAGCGAGGCCGGTTCT
CACACCCTCCAGATGACGTTTGGCTGCGACGTGGGGTCGGACGGGCGCTTCCTCCGCGGG
TACCACCAGTACCCTACGACGGCAAGGATTTACATCGCCTGAAAGAAGACCTGCCTCTTGG
ACCGGGGNGGACATGGCGGTTAANATAACAAACGCAAGTGGGANGCGGGCCATGNGGG
BSK-1E2-C24 - reverse
GATGATTGGGGAGGGAGCACAGGTCAGCGTGGGAAGAGGGTCATGGTGGACATGGGGG
TGGGGTGGTGCTAANACAAGGTANAGTANGANATACTTTTCTTACCTNTTTATGCTGA
BSK-1H5-A1 - forward
CTTCAACAAGATAGAAATCAATAACAAGCTGGAATTTGAGTCTGCCCAGTTAACCCCAACTG
GTACATCAGCACCTCTCAAGCAGAAAACATGCCCGTCTTCCTGGGAGGGACCAAAGGCG
GCCAGGATATAACTGACTTCACCATGCAATTTTGTGTCTTCCTAAAGAGAGCTGTACCCAG
AGAGTCCTGTGCTGAATGTGGACTCAATCCCTAGGGCTGGCAGAAAGGGAACAGAAAGG
TTTTTTGAGTACGGCTATAGCCTGGACTTTCCTGTTGTCTACACCAATGCCCAACTGCCTGC
CTTAGGGTAGTGCTAAGAGGATCTCCTGTCCATCAGCCAGGACAGTCAGCTCTCTCCTTT
CAGGGCCAATCCCCAGCCCTTTTGTTGAGCCAGGCCTCTCTCACCTCTCCTACTCACTTAA
AGCCCGCCTGACAGAAACCACGGCCACATTTGGTTCTAAGAAACCCTCTTGTCATTCGCT
CCCACATTCTGATGAGCAACCCGTTTCCTATTAATTAATTAATTTGGTNGGAAGGAAAAA
CATTGGCTAATTTATTCAAAGGGGGG
BSK-1H5-A1 - reverse
CAGGGAAGTTTATTTCAAAACCATTGAACAGTATGATATTTGCTCATTTATAAATAAACCC
ATTTAAATAATCTGAGCTTATATATTTTCAGTCTTAATTAAAGGACTTGATTTAAAGAGAG
CACACCAGTCCAAATTGAATTGATTCCATAGCTATTAAAAACTAGGCTCTTTTACAGACA
CTGCTACTTCTTGCCCCCTTTGAATAAATTAGACCAATGAATAAAACAAACAAACAAATA
AATAAATAAATAGGGAAGCGGTTGCTCATCANAATGTGGGAGCGAATGACAGAGGGAA
CTTANAACCAAATGTGGCCCGTGGTTTCTGTCAGGCGGCTTTAAGTGAGTAGGAAAGGTG
AGAGAGGCCTGCTCAACAAAAGGGCTGGGGATTGGCCCTGAAAGGANAAAGCTGACTGC
CTGCTGATGGACAGGAAATCCTTTACACTACCCTAAGGCAGGCAGTAGGCATTGGGTAA
ACACAGGAAGACG
BSK-1L2-B15 - forward
CGTTCATGGGGAATAATTGCAATCCCCGATCCCCATCACGAATGGGGTTCAACGGGTTAC
CCGCGCCTGCCGGCGTAGGGTAGGCACACGCTGAGCCAGTCAGTGTAGCGCGCGTGCAG
CCCCGGACATCTAAGGGCATCACAGACCTGTTATTGCTCAATCTCGGGTGGCTGAACGCC
ACTTGTCCCTCTAAGAAGTTGGGGGACGCCGACCGCTCGGGGGTCGCGTAACTAGTTAGC
ATGCCAGAGTCTCGTTCGTTATCGGAATTAACCAGACAAATCGCTCCACCAACTAAGAAC
GGCCATGCACCACCACCCACGGAATCGAGAAAGAGCTATCAATCTGTCAATCCTGTCCGT
GTCCGGGCCGGGTGAAGGCAGTGAGCTGAGATTGCGCCACTGCACTCCAGCCTGGGCGA
CAGANCGAGACCCCATCTCAAAAAAAAAGGGGGGGGGTGGACAGGGGGCAAGTGGAGT
CTGGCTTGCCAAAACTACTTGTTGATGGNGGGGAAAAAAAAATGGGTGNCTTCCTCCTTG
GCACTGGGAAAGGTTTTGGTTCTTTTTTTCAT
BSK-1L2-B15 - reverse
GAAAGTTTAGAAACTTTAAAACAATAATAATGACGGTGATAGTGATAATAATTGCTAAT
GCTTCAGATCACATATGTGTTAGGCGCTGTTTTTTGTTGTTGTTGTTATTGTTGAGACAG
TCTCACTCTGTTGGCCAGGCTGGAGTGCAGTGGTGCTTTGCCTCCTGGGTTCAAGGGAAA
CTCCTGCCTCAGCCTCCTGAGTAGCTGGGATTACAGGCATGCGCCACCACGTCGGGCTAA
TTTTTGCATTTTTAGTGGAGACGGGGTTTCATCATGTTGGCCAGGCTGGTCTCGAACTCAC
GACGTCAAGTGATCCACCTGCCTCGGCCTCCCAAAGTGTTGGGATTACAGGCGTGAGCCA
CCATGCCCAGCCAGCACTGTCTTAAATGCTTTACATATATTATCTCATTTAATCCTCAAAA
TACCTTACAATATAGATACTACTATTATTTCCATTTATATTAATGGCANCTCTGAGGCTCA
AACGATGAACTACTTGCTGGGTTACATGA
BSK-1M13-B2 - forward
CCCAAAAATTACCCAAAGAAGAAGATGGAAAAGCGATTTGTCTTCAACAAGATAGAAAT
CAATAACAAGCTGGAATTFTGAGTCTGCCCAGTTCCCCAACTGGTACATCAGCACCTCTCA
AGCAGAAAACATGCCCGTCTTCCTGGGAGGGACCAAAGGCGGCCAGGATATAACTGACT
TCACCATGCAATTTGTGTCTTCCTAAAGAGAGCTGTACCCAGAGAGTCCTGTGCTGAATG
TGGACTCAATCCCTAGGGCTGGCAGAAAGGGAACAGAAAGGTTTTTAAGAGTACGGCTATA
GCCTGGACTTTCCTGTTGTCCACACCAATGCCCAACTGCCTGCCAAAGGGGTAGTGCTAA
GAGGATCTCCTGTCCATCAGCCAGGACAGTCAGCTCTCTCCTTTCAGGGCCAATCCCCAG
CCCTTTTGTTGAGCCAGGCCTCTCTCACCTCTCCTACTCACTTAAAGCCCGCTGACAGAAA
CCACGGCCACATTTGGTTCTAAGAAACCCTCTGTCAAACGCTCCCACATTCTGATGAGCA
ACCGTTCCCTATTTAATTATTTATTGGTNGTTGG
BSK-1M13-B2 - reverse
GAGNGAAGTTTATTTCAAAACCATTGAACAGTATGATATTTGCTCATTTATAAATATTCC
CATTTAAATAATCTGAGCTTATATATTTTCAGTCTTAATTAAAGGACTTGATTTAAAGAGA
GCACACCAGTCCAAATTGAATTGATTCCATAGCTATTAAAAACTAGGCTCAATACAGAC
ACTGCTAGTTCTTGCCCCCTTTGAATAAATTAGACCAATGAATAAAACAAACAAACAAAT
AAATAAATAAATAGGGAAGCGGTTGCTCATCANAATGTGGGAGCGAATGACANAGGGTT
TCAATTANAACCAAATGTGGCCCGTGGTTTCTGTCAGGCGGCTTTAAGTGANTAGGAAAGGT
GAAAGAGGCCTGCTCAACAAAAGGGCTGGGGATTGCCCTGAAAGGANANAGCTGACTG
GCCTGCTGATGGACAGGAAACCTTACACTACCCTAAGCNGCANTGGCCAAAGGTGNGG
ACACAGGAAAG
BSK-2C5-B3 - forward
CGGAATCCCGAAAAAATCGCACATACATTCCTAAAGTTTATATAAACAAGGAAAGAAAA
GAAGGAAAAGAAAGCCGAAGAGCTTTGATTTTTGAAAGGAAAGTTTTGAGTACCTGACT
GAACACCCAACTTGAACTCCGTTCAACTTGCCTGAACAATCCAACAGCTGACTGCTGGAA
CAAGGAAAGGTAGGCACAGCAACAGGCAGGCTAATGGGATTTCTGAAACAGATACAGTA
CCCTGCCATGTTCTTTCACCTGCAAGGGGGAGGGGTGTGTGTGTGTGTGTCTGTGTATAC
ACCGTAAGTGCTAAAGTGCCTGAAAGGCACCTGGGAACAGTACTTAACTGACACCAAGG
TAAGAGACTGTCAGTTCAGCTGANCTAAGGGGAAAACGGCAATTAGGTGTGCCACTGAG
ATTGCTATGTGTAAGGTCCTCCCCTTCTCCTGCAACTTTTCTTCTATTTCTTTTTCCTTTCA
CATGAAAGCCCCTATGTCCCACACCAAATGTCTTAACTGAAGGAATTCCCCTTTTCTTAA
CAAGGNAGTTTGAAAACGGAGGG
BSK-2C5-B3 - reverse
GATTCCAACCTTCACAGATAACTGAGTCTTGATTTGACTTCAAGACTTCAGTGGAGGAAG
TAACTACAAATGTGGTAGAAATAGCTAGATAACTAGAAGTGGTGGAGCCTGAAGATCTG
ACTGAATTGCTGCAGTCTCATGATTAAACTTGAACAGATGAGGATTTGCTTCATATGGGT
GGATACAGAAAGTGGTTTCTTGAGATGAAATCTACTGCTGGCAGAGATGCTGTGAACATC
GTTGAAATGACAACAAAGGACTTCGAATATCAGTAAAATCAGTTGATAAAACCAAAGCA
GGGTTTGAGAGGATGCACTCCCAATTTTGAAAGAAGTTCTTGTGTGGGTGAACGCTATCA
TACCAAACAGCATCGCAAGCTACAGATAAATCTTTCGTGATAGAGTCAATTGACGTGACA
AACTTCATTGGTGGCATTTTAAGGCATTGCCACAGTCACCCCAAAACCCGCAGCAGCCAT
CAACAACNGGCAAGACCCTNCACAACAAAAAGATGA
BSK-2D9-A10 - forward
GTCGTTTTCCAGTTTTTCTTTATTACTTATTTCATTCACCATAATTCCAAATTTTAATGACC
ATATCTTTCCTAAAATATCTACATAAAAATCTTGATTATTTAAGAGTAAAAAGAAGGTTTC
TCCTCTAGCTACTTCTGACCTCTTCAATAAATTGTGCCTGATGCTGCCTCCTTTCCTTCCAA
CCACTCACATTAGAATCCTTTTAGTCAAAGTAGTCTGAGGCTGCAGTTGTTTGCAGGATG
TGATCATCCTCAATACCATATTATTTCAGAGTAGCTTAAGTCACCATTCCTAGGCAATTTC
ATAGTAAAAAAATTATTCTAGGAATTCCTGGACCTATAGATATTTCCAAGATCATTACAA
AAATACTTCTTTTTAAATAAAAAAAAATTGCTAATGNACCATGCTGGGAAATTTTTATTT
AAAAAATAGAACTAAACTCTTGAGCTTCAATAATGCTGGCAGATAGATTCTCANGGCCAA
CTACTGGCCTCAAGGAAATGATGGCNCCCCTCAGTTTGGGAAAGG
BSK-2D9-A10 - reverse
TTTGTATTATAGGAACCTATTTTGAAGCTCTTAGAGCTGAGAGTTAAGTGGTCTTTTAATG
GAACTGCTAAGACAAGGTAGAGTAGGAGATACTTTTCTTCCCTCTTTATGCTGAAGTGTT
TTAGTGTTTCTGTCTGTGACTAGGCAGTAACTTTGAAAGGGATAAGATAGGGTTAATAAC
ATATCTACTAAAACTTGGAAAATATACTATATTTTCTGAGATAAAAATCTTTGGATTGAA
AATTACTTTCTGGTGGAATATGGCAAACTGACATTCATTCAATGTAAGACTTTTTTTCCCT
CACTTTTTGTGTTTTCATCTGTAGTTTTTTTTTTTCTTTTTTACCTGTGGTACCATTTTTAAG
GTGAATCAGGCCAGTTTCANCAAAAAATGGNTGTACTGTTCATCACTTCAGTAGAAGGTA
GGATGACTTCGATGANGGTGNGCTCAGTAACTTCTCTGGTGCTGAATTAGGGCCTGGGAC
AAANAAGGATCCCATCTTACAAATAATGACAANGGAGACTACNGAATCCGGGAG
BSK-1G13-C15 - forward
CGGAATCCGTTTTAAGATGGAGTGTCATTCTGTCACCCAGGTTGGAGTGCAGTGGCGTGA
TCATGGCTCACAGCAACCTCTGCCTCCCAGGTTCAAGCAATTCTCCTGCCTCAGCCTCCTG
AGTAGCTGGGATTACAGGTGCCCGCCAGCACGCCCAGCTAATTTTTGTATTTTTTAGTAGA
GACAGGGTTTCACCATGTTGGCCAGGCTGGTCTCGAACTTTTGACCTCAGGCGATCCACC
TGTCTCCGGAATTCGGGTTACGGCAGCACTTTTATTTTTCCTTACACAATGACGTGTTGCT
GGGGCCTAATGTTCTCACATAACAGTAGAAAACCAAAATTTGTTGTCATCTCTTCAAAGA
ATCGAGAATTGCGTACAAAAAAAACCTTACATAATTAAGAATGAATACATTTACAGGC
GTAAATGCAAACCGCTTCCAACTCAAAGCAAGTAACAGCCCACGGTGTTCTGGCCAAAG
ACATCACTAAGAAAGGAAACTGGGTCCTACGGTTGGACTTTNCACCCTGACAGACCCGC
AAGACAAAACAACTGGTTCTTGC
BSK-1G13-C15 - reverse
CGGAGGAGCACCCAGTGCTGCTGACCGAGGCCCCCCTGAACCCCAAGGCCAACAGAGAG
AAGATGACTCAGATTATGTTAAGAGACCTTCAACACCCCGGCCATGTACGTGGCCATCCAG
GCCGTGCTGTCCCTCTACGCCTCTGGGCGCACCACTGGCATTGTCATGGACTCTGGAGAC
GGGGTCACCCACACGGTGCCCATCTACGAGGGCTACGCCCTCCCCCACGCCATCCTGCGT
CTGGACCTGGCTGGCCGGGACCTGACCGACTACCTCATGAAGATCCTCACTGAGCGAGG
CTACAGCTTCACCACCACGGCCGAGCGGGAAATCGTGCGCGACATCAAGGAGAAGCTGT
GCTACGTCGCCCTGGACTTCGAGCAGGAGATGGCCACCGCCGCATCTCCTCTTCTCTGGA
GAAAACTACGACTGCCGATGGCANGTCATACCATTGGCATGAGCGGTTCCCGGGTCCGG
AGGCGCTGTNCANCCTTCTTCTGGGNATGG
BSK-2G14-B4 - forward
CTTTACTAAAAATACAAAAATTAGCCAGGCATGGTGGCAGGTGCCTGTAATCCCAGCTAT
TCGGGAGGCTGAGGCAGGAGAATCACTTGAACCCAGGAAGTGGAGGTTGCAGTGAGCCG
AGATCGTACCACTGCACTCCACCCAGGGTGACAGAGTGAGACTCCGTTGAAAAAAAGAG
AAAAAAAAATTAATACAAAGATATTAAAATTAAAAAGGAAAAATATCCCCAGAACCCCA
TCACTTAAACAACAAATCAAATTTTTATTTTTCTCTTCCCATCCTACAAGGCAACATAACT
CTGACCTGCTTAGAATCCCCGTGTCAGGCCACTTTCCTATTCTGTTTCTTCCCACTCCTCA
CCGTGCCCACACACCTTCCTTGGGGGTGAACGCGTGCGGACGGTAGACGGCCCCTCATCC
CCCGACTGCCTGCCCGGGTGGAACTG
BSK-2G14-B4 - reverse
CAGTTCCACCCGGGCAGGCAGTCGGGGGATGAGGGGCCGTCTAGCGTCCGCACGCGTTC
ACCCCCAAGGAAGGTGTGTGGGCACGGTGAGGAGTGGGAAGAAACAGAATAGGAAAGT
GGCCTGACACGGGGATTCTAAGCAGGTCAGAGTTATGTTGCCTTGTAGGATGGGAAGAG
AAAAATAAAAATTTGATTTGTTTGTTTAAGTGATGGGGTTCTGGGGATATTTTTCCTTTTTA
ATTTTAATATCTTTGTATTAATTTTTTTTTCTCTTTTTTTCAACGGAGTCTCACTCTGTCACC
CTGGGTGGAGTGCAAGTGGTACGATCTCGGNTCACTGNAACCTNCACTTCCTGGGTTCAA
GTGATTCTCCTGCCTCACCTCCCGAATAGCTGGGATTACAGGCACCTGCCACCATGCCTG
GCTAATTTTTGNATTTTTAGTAAAG
BSK-2G9-A1 - forward
CTTCAGCGAAGTTTATTTCAAAACCATTGAACAGTATGATATTTGCTCATTTATAAATATT
CCCATTTAAATAATCTGAGCTTATATATTTTCAGTCTTAATTAAAGGACTTGATTTAAAGA
GAGCACACCAGTCCAAATTTGAATTGATTCCATAGCTATTAAAAACTAGGCTCTTTTACAG
ACACTGCTACTTCTTGCCCCCTTTGAATAAATTAGACCAATGAATAAAACAAACAANCAA
ATAAATAAATAAATAGGGAAGCGGTTGCTCATCANAATGTGGGAGCGAATGACAGAGGG
TTTCTTANAACCAAATGTGGCCGTGGTTTCTGTCAGGCGGCTTTAAGTGATAGGAAAGGT
GAAAAAGGCCTGGCTCAACAAAAGGGCTGGGGATTGGCCCTGAAAGGANAAACTGACT
GCCTGCTGATGGACAGGAAACCTNTTACCCTCCTANGCNGCNNTTGGGCTTGGGGGNAA
CACNGGANAGCCNGGNThFACCCGACCCNAAAG
BSK-2G9-A1 - reverse
CCCATCATCAATATTTATTGAGCATTTACAGTGTACTAGGCACAATAGAACATACAGAAA
ACATTGTCCCTGCTCTTGAGGAGCTTACATTCTAAAAGAAAAAATACACCTTTTTTAAAA
TGGCATTTTTGTTTGGTGTTTTCTGCAAAGTACTGAGGAAATATTTTGTAAAGTGAGCTTT
GGCCTTGGGCCTCAAGGAAAAGAATCTGTACCTGTCCTGCGTGTTGAAAGATGATAAGCC
CACTCTACAGTTGGAGAGTGTAGATCCCAAAAATTCCCAAAGAAGAAGATGGAAAAGC
GATTTGTCTTCAACAAGATAGAAATCAATAACAAGCTGGAATTTGAGTCTGCCCAGTTCC
CCAACTGGTACATCAGCACCTCTGAAGCANAAAACATGCCCGTCTCCCTGGGAGGGACC
AAAGGCGGCCAGGATATAACTGACTTCACCATGCAATTGNGTCTTCTAAAGAAGAGCT
GACCCAAAAAGTCCTGNGCTGAATGNGGACTCAATCCCTAGGCTGGGCANAAAGGG
BSK-2G9-B1 - forward
CCCTTAGAGCCAATCCTTATCCCGAAGTTACGGATCCGGCTTGCCGACTTCCCTTACCTAC
ATTGTTCCAACATGCCAGAGGCTGTTCACCTTGGAGACCTGCTGCGGATATGGGTACGGC
CCGGCGCGAGATTTACACCCTCTCCCCCGGATTTTCAAGGGCCAGCGAGAGCTCACCGGA
CGCCGCCGGAACCGCGACGCTTTCCAAGGCACGGGCCCCTCTCTCGGGGCGAACCCATTC
CAGGGCGCCCTGCCCTTCACAAAGAAAAGAGAACTCTCCCCGGGGCTCCCGCCGGCTTCT
CCGGGATCGGTCGCGTTACCGCACTGGACGCCTCGCGGCGCCCATCTCCGCCACTCCGGA
TTCGGGGATCTGAACCCGACTCCCTTTCATCGGCCGAGGGCAACGGAGGCCATCG
BSK-2G9-B1 - reverse
GCGATGGCCTCCGTTGCCCTCGGCCGATCGAAAGGGAGTCGGGTTCAGATCCCCGAATCC
GGAGTGGCGGAGATGGGCGCCGCGAGGCGTCCAGTGCGGTAACGCGACCGATCCCGGAG
AAGCCGGCGGGAGCCCCGGGGAGAGTTCTCTTTTCTTTGTGAAGGGCAGGGCGCCCTGG
AATGGGTTCGCCCCGAGAGAGGGGCCCGTGCCTTGGAAAGCGTNCGCGGTTCCGGCGGC
GTCCGGTGAGCTCTCGCTGGCCCTTGAAAATCCGGGGGAGAGGGTGTAAATCTCGCGCC
GGGCCGTACCCATATCCGCACAGGTCTCAAGGTGAACAGCCTTGGCATGTTGGAACAAT
GTANGTAAGGGAAG
BSK-2G9-C3 - forward
CAAACCCACTCCACCTTACTACCAGACAACCTTAGCCAAACCATTTACCCAAATAAAGTA
TAGGCGATAGAAATTGAAACCTGGCGCAATAGATATAGTACCGCAAGGGAAAGATGAAA
AATTATAGCCAAGCATAATATAGCAAGGACTAACCCCTATACCTTCTGCATAATGAATTA
ACTAGAAATAACTTTGCAAGGAGAGCCAAAGCTAAGACCCCCGAAACCAGACGAGCTAC
CTAAGAACAGCTAAAAGAGCACACCCGTCTATGTAGCAAAATAGTGGGAAGATTATAG
GTAGAGGCGACAAACCTACCGAGCCTGGTGATAGCTGGTTGTCCAAGATAGAATCAAAG
TTCAACTTTAAATTTGCCCACAGAACCCTCTAAATCCCCTTGTAAATTTAACTGTTAGTCC
AAAGAGGAACAGCCCTTTGGACACTAGGAAAAAACCTTGTAGAGAGAGTAAAAAATTTA
ACACCCATAGTAGGCCTAAAAGCCGGAATTNCAGCTTGAGCGCCGGTCGTTCCAAAACCA
GNCGGTCTGGGGGTCAAAAATATAATAACG
BSK-2G9-C3 - reverse
GCTTTTAGGCCTACTATGGGTGTTAAATTTTTTACTCTCTCTACAAGGAATTTTTTCCTAGTGT
CCAAAGGGCTGTTCCTCTTGGACTAACAGTTAAATTTACAAGGGGATTTAGAGGGTTCT
GTGGGCAAATTTAAAGTTGAACTAAGATTCTATCTTGGACAACCAGCTATCACCAGGCTC
GGTAGGTTTGTCGCCTCTACCTATAAATCTTCCCACTATTTTGCTACATAGACGGGTGTGC
TCTTTTAGCTGTTCTTAGGTAGCTCGTCTGGTTTCGGGGGTCTTAGCTTTGGCTCTCCTTGC
AAAGTTATTTCTAGTTAATTCATTATGCAGAAGGTATAGGGGTTAGTCCTTGCTATATTAT
GCTTGGCTATAATTTTTCATCTTTCCCTTGCGGNACTATATCTATTGCGCCAGGTTTCAAT
TTCTATCGCTATACTTTATTTGGGTAAATGGTTGGCTAANGGTGCTGGTATAAGNNCAGN
GGGTT
BSK-2H10-A4 - forward
TTGAACGCTTTCTTAATTGGTGGCTGCTTTTAGGCCTACTATGGGTGTTAAATTTTTTTACT
CTCTCTACAAGGTTTTTTCCTAGTGTCCAAAGAGCTGTTCCTCTTTGGACTAACAGTTAAA
TTTACAAGGGGATTTAGAGGGTTCTGTGGGCAAATTTAAAGTTGAACTAAGATTCTATCT
TGGACAACCAGCTATCACCAGGCTCGGTAGGTTTGTCGCCTCTACCTATAAATCTTCCCA
CTATTTTGCTACATAGACGGGGTGTGCTCTTTTAGCTGTTCTTAGGTAGCTCGTCTGGTTT
CGGGGGTCTTAGCTTTGGCTCTCCTTGCAAAGTTATTTCTAGTTAATTCATTATGCAGAAG
GATAGGGGTTAAGTCCTTGCTATATTATGCTTGGGTATAATTTTTCATCTTTCCCTTGCGG
TACTATATCTATTGCGCCAGGTTTCAATTTCTATCGCCTATACTTTATTTGGGTAAATGGN
TTGCTAAAGGTGNCTGGTAATAAGGTGGAATGGGTTTGCGGA
BSK-2H10-A4 - reverse
CANNCCCACTNCANCTTACTACCNGACATCCTTANCCAAACCATTTACCCAAATANAGTA
TAGGCGATAGAAATTGAAACCTGGCGCAATAGATATANTACCGCAAGGGAAAGATGAAA
AATTATAACCAAGCATAATATAGCAAGGACTAACCCCTATACCTTCTGCATAATGAATTA
ACTAGAAATAACTTTGCAAGGAGAGCCAAAGCTAAGACCCCCGAAACCAGACGAGCTAC
CTAAGAACAGCTAAAAGAGCACACCCGTCTATGTAGCAAAATAGTGGGAAGATTTATAG
GTAGAGGCGACAAACCTACCGAGCCTGGTGATAGCTGGTTGTCCAAGATAGAATCTTAG
TTCAACTTTAAATTTGCCCACAGAACCCTCTAAATCCCCTTGTAAATTTAACTGTTAGTCC
AAAGAGGAACAGCTCTTTGGACACTAGGAAAAAACCTTGTAGAGAGAGTAAAAAATTTA
ACACCCATAGTAGGCCTAAAAGCAGCCCCAATTAAGAAAGCGTCAACGGAATTNCAGCT
GAGCGCCGGTCG
BSK-4-4 - forward
GCTGGAAATACAGCAATGAATAGGTCTCTAGTCTCCTGGAACATCAAATGATGTTTATCC
AAAAGTATAAATAGTTACCATTTTTATTGTCTTCTTAATAAATTGAATAAAATAATGTCT
TTGCTGCCAGTAACATGGATGGAACTGGAAGTCACTATTTTAAGTGGAATTAAAGAAAA
AGAAAGTCAAATACCATAGGTTCTCACTTATAAGTGGGAGCTAAATAATGTATACACATA
GACGTAGAGTGTGAAATAATAGATATCGGAGACTCAGAGAATTGTTTTGTTTGAGGAGG
CTGAAGATAGGACCCCAATCCCTTCTAGCTTGTAGGGTTTCTGCTGAGAAATCTGTGGTT
AATCTAAGTTTCCCTTTATAGGTTACCTGGTGCTTTTGCTCACAGCTCTTAAGATTCTTTN
CTTCGCTTAACTTTGGCTAACCTGGTGACAATATGCCTANGCGATGATCNTTTTGNGATA
AATTTTTCAAGTGGTCTTTGTGCCTAAGNCTCTAGCAGACTTGGGGAAGTTTTCCTTGATA
TTTCCCCAAATATGGTTTTCAAGCTTTANAATCTCTTCTTTCTCAGGAACCCCGATATTCT
TAAGGTTGNCCTTGAGCTNATCCCAANTTTTTTGAGGTTTGTNAAATGGGCTAAAANAAT
TCTTTGCNTTTNANGNATGGGNTCANTTTNAAAACCTTGNTTTTAANCCNCGAAAT
BSK-17 - forward
CTGTGTTAGAAAAAATCATAAAACATAACAGAATCTACACATCATGGTCCACCAGAGGA
TTCACAGATGGAAATGAATTTTAATATTGTTACTTTTGAAGTCCCAAATACTTTAAGATTT
ACAATAAAAAACATTCTGACAGAGTCCATGATGAATTATTTCCAGTCTTTCACCAGACTG
CTTAAGCTCACCTATAAACTACGAAATGTATAAATAAATAATTACAGCCAAAGCAGGTA
ACAAAGTGTCTAACCTATATTTCCACAGGTGCATACCATGGCTACGAATAAACTATCCAAT
CTAACCACAGAAGCTGAGCATTTGGTTTGGGGTTAATCCACATCACATGACTCACCATTG
AGAAAGCGGCTCTCACCATGCTTAATGGGCACAGCACCTCTGCAAACAAATCCTTCCCTG
GCTAATCATTCCCTCTGAGAGGTTTCCTCAGTAAAGAGATTAGAACTACCTCTTGCATTTC
CAACTTTTAAAAAATTGCCTTTTTGGAAATCTACCACCACCAACTAATTCTTGACAGACTT
GTAGAGAATGACCCTCAAAGAAATATCATTCGAGACACATATTCAAGCAGACTGGNCAT
GGTGGCTCATGCCTGCAGTCCCAGCAGTTTGGGAAGCTGAAGTGAACTGATGCTTGAATN
CAGGAGTCTTGAGAACAGCCTGGGTAACATGGNAAAACCGGGTCCTACAAAAAAATTCC
NAAAATTACCCNGGTNTGTTGGNGCACAATGNGGGCCCAACTTTNCCNAAAGAAAAAAG
TTTGGCTTCAGGAAGGCAAGGGTCNCNNANCCCTGAATGGCCCCTTCCTTTCAACCGGGGN
AAAAANGGGNAACCTTTTTGGNAAGGGAAGGGAAAGGGAAAGGGAGGGCCTTTTNNNT
TTAAAAAAGGGANNTTAAAAGGNGGCCCNAAAACNTTTTTAAAGGGCAACCTTTTTNC
TTTTTTGGGAAAATTGGGGNAAAT
BSK-23 - forward
AGGGGATGCTCTCGGTGTCTGAGCTGTTGTTGACAGTGGCTGGGCCACTGCATTCCCCTC
TGGGCACCTCATTCCCAGAGGCATGTAAGGCTTCAGCCTCCTCCACCATCTCCTCCTCATT
TCCGCTCACGCCCGACGCCTCCATCTCCTCATCCTCCACCACGGGCGGGAATGCAGCCTC
CTCGCTGGCCGCCGCCGGCGCTTTCTTCTTCTTCCTCCGCGCGTTCCTCTCCAACTCCATCT
TCAGCTTGTGCTGCTGCAAGATCTCATCGAGGTTCTGCCTCTTCTTGTAGTTGAAGTAGAA
GTTCTTACACTGCGACACAGTCTTGGAGCCCACCATCCGGGCGATGGCCGACCAAGAAGC
GGCCGTGTTCCAGGAGACCTTTCTTGGCTGNTTCCATTTCTTCTTCTGTCCAGCGAGAACT
CTCATTCACTTCANGGAGGCCAGCTCGGCGCTCTGCTGGGGGGTGATGGCCTCCTCGAAG
TGGCCTCATTAGCCCTTGAACCGGGTGATGCGGGCCTTTGGNCTTCCCTGGCTTGAAGCA
ANTTTGCGGCCTTTGGAGGCCACAGCTTCCTTTTGGNGGTTGGNCCTCCCCTGAGGGGNC
GCTGGCTTNTCCTTGAGGANGGCTTCCTTGGGGTNTTCACCTCGGGTTTTCCCTCTTTTCG
GGTTCNTTTTCCGGAATCCCCNAATTGACGGTTCAGAATTTNGCCCAATCCA

[0020] These genes or tools that make use of these genes are preferably used to characterize the molecular processes, in particular, in the monocyte/macrophage system, for the diseases mentioned.

[0021] As can be seen, the genes in Table 1 can be divided into various function groups:
[0022] cytokines, soluble factors, messenger substances and ligands that exert a controlling influence on the inflammatory process;
[0023] receptors, ion channels and associated proteins that activate a signal chain as soon as they are activated themselves;
[0024] kinases, protein kinases and their antagonists that are the switches for activation and forwarding or blocking of the intracellular signal transmission;
[0025] signal transduction molecules that are part of the intracellular signal chain and contribute to controlling gene expression or other secondary mechanisms (activation of preformed molecules);
[0026] Transcription and translation factors and associated molecules that are involved in regulating specific gene expression and protein synthesis;
[0027] Ribosomal and ribonuclear regulator proteins that are involved in protein biosynthesis;
[0028] enzymes and enzyme-associated proteins that have a regulatory function for other signal molecules;
[0029] proteinases, matrix metalloproteinases, enzymes and their inhibitors that influence decomposition of the tissue matrix and the resulting organ damage;
[0030] oncogenes, protooncogenes, differentiation factors and genes from embryonal development that influence cell development; (proliferation, differentiation, dedifferentiation);
[0031] apoptosis genes and regulators of the cell cycle and cell death;
[0032] acute phase proteins that indicate cell activation and inflammation;
[0033] surface membrane molecules that characterize a specific cell type or cell population;
[0034] other molecules that are found in increased quantities with the inflammatory disease mentioned but cannot be assigned to any of the above groups;
[0035] gene sequences as yet not characterized in any detail that show differing degrees of expression in their own differential gene expression analyses;
[0036] control genes that do not show any gene expression between chronic inflammation and controls and are required for standardization, comparability, and quantification of an array analysis.

[0037] The genes or gene sequences according to the invention may also be allels, derivatives or splicing variants.

[0038] These genes were derived from differential gene expression analyses by gene subtraction from blood and tissue samples of chronic inflammatory diseases and suitable control samples (samples from regular donors or patients that have degenerative diseases).

[0039] Advantageously, a gene pool was created by this type of selectioning that is both specific to the inflammation and to the cells of the monocyte/macrophage system. Subtractive gene processes allow the preselection of differentially expressed genes. This includes methods such as differential hybridization or the PCR-based representational difference analysis (RDA) and differential display (DD). Using subtractive methods, the number of genes or their partial sequences to be applied to a chip can be considerably reduced and specified, so these are therefore of greater importance for the chip method when being inflammatory or cell-specific.

[0040] Analysis of gene expression in inflammatory diseases is to be focused on the genes and gene groups mentioned above using genetic information (cDNA, its partial sequences or corresponding oligonucleotides, RNA) using an array or fluorescence cytometric method or specific oligonucleotide pairs in a quantitative PCR technique. Preferably, only the genes in the gene groups mentioned above or a partial group thereof are to be used for quantitative DNA/RNA high throughput gene expression analysis. Alternatively, a more comprehensive array (such as the UniGene array) can be used and focused on the genes listed in the bioinformation analysis step.

[0041] The molecular tool according to the invention provides an opportunity to characterize a disease in molecular terms and, based on this characterization, 1) determine a molecular classification and stages of a clinically defined inflammatory disease, 2) establish an individual prognosis profile, 3) make proposals for molecular pathogenesis, 4) determine treatment effects and ways of treatment monitoring, and 5) develop new treatment strategies and pharmacological concepts.

[0042] In this way, DNA/RNA microarrays and the fluorescence cytometric technique are to be used for diagnosis, forecasting, and treatment monitoring. DNA/RNA microarrays are arrangements of molecular species on a carrier that are used to detect interacting species (such as complementary nucleic acids).

[0043] Therefore, the gene sequences used in the methods protection is applied for as tools of inflammatory diseases from claim 1 are not accidental but were subjected to prior selectioning.

[0044] Suitable substrate materials (glass, plastic) are used for the array and microarray technique and chemically activated or modified, reactively coated with reactive groups that bind amino linkers, metal compounds or alloys to achieve permanent bonding of the cDNA, partial cDNA sequences, oligonucleotides, and RNA from the gene sections selected or the genes to be examined. Application of the individual cDNAs, RNAs or oligonucleotides is site-specific using suitable printing methods. Alternatively, lithographic methods of synthesis can be applied to synthesize the respective oligonucleotide sequences directly and with site specification on the substrate.

[0045] For DNA microarrays, cDNAs coupled via amino linkers and DNA oligomers are preferably applied onto modified and chemically activated glass surfaces of the biochips.

[0046] According to the invention, a DNA microarray for diagnostic, prognostic and therapy-monitoring analysis of chronic inflammatory diseases, bacteria-induced inflammations, tumors, arteriosclerosis and sepsis is provided to the surface of which a great number of selective monocyte/macrophage genes, gene sections, and oligomer sequences are bound for detection.

[0047] The selective monocyte/macrophage genes, their gene sections or oligomer sequences can be used in an RNA microarray.

[0048] The selective genes or their gene sequences preferably are a gene library bound in solid phase that is preferably provided in the form of a cDNA library cloned into phages or plasmides.

[0049] The cDNA library at least comprises the genes and gene sections listed below, which are representative of the diseases mentioned above.

[0050] The cDNA molecules, their partial sequences or their inherent oligomer sequences may either be monocyte/macrophage genes whose function is known or genes whose function is not known or that have not been known as yet.

[0051] The genes whose function is known are important for the analytical aspect of the application and should therefore be considered in addition to the genes with unknown functions or completely unknown genes listed in Appendix 1.

[0052] Suitable substrate materials (glass, plastic) are used for the array and microarray techniques and chemically activated or modified, reactively coated with reactive groups that bind amino linkers, metal compounds or alloys to achieve permanent bonding of the cDNA, RNA, or oligonucleotides from the gene sections selected or the genes to be examined. Alternatively, substrates (nylon membranes) are used for coating. Application of the individual cDNAs, RNAs or oligonucleotides is site-specific using suitable printing methods (piezo or pin technique). Alternatively, in-situ methods of oligonucleotide synthesis can be applied to synthesize the respective oligonucleotide sequences directly and with site specification on the substrate.

[0053] In a fluorescence cytometric process, individual cDNAs, RNAs, or oligonucleotides from selective gene sections bonded to substrate beads made of plastic or glass are used that have a defined size which can be assigned to each specific nucleotide sequence. These beads can be activated or modified chemically, coated with reactive groups that bind amino linkers or other reactive groups such as metal compounds or alloys to ensure a lasting bond of the cDNAs, RNAs, or oligonucleotides. The cDNAs, RNAs or oligonucleotides are bound by incubating the respective beads of equal size in suitable solutions that contain the respective cDNA, RNA or oligonucleotide and facilitate a firm bond to the beads. The various populations of beads that carry nucleotide sequences, wherein each nucleotide sequence is assigned to a defined bead size or fluorochrome, are mixed at even bead parts so that a defined selection of genes can be examined at the same time in one batch.

[0054] When using both array and fluorescence cytometry, the sample to be examined is labeled, either directly with a fluorochrome or with a bridge molecule such as biotin or digoxigenin, for later binding of the fluorochrome with or without signal amplification, preferably using streptavidin or anti-digoxigenin antibodies coupled to streptavidin. When using fluorescence cytometry, detection can be carried out by having fluorescence-specific antibodies detect a defined target antigen on the bead surface using the biotin/streptavidin system, either with or without signal amplification. As an alternative, amplification systems such as metal/noble metal complexes are available for array and fluorescence cytometry. Detection can also be performed with radioactivity using a filter membrane based technique.

[0055] The labeled sample is quantitatively hybridized with the beads that carry the array or nucleotide sequence and the result can be read out after final labeling with a fluorochrome using a laser scanner on the array or a FACS analyzer.

[0056] In array and fluorescence cytometry, crude data (signal intensity) is analyzed and evaluated biometrically using several commercial software programs or programs such as Microarray Suite (Affymetrix) for the array technique or BD CBA Analysis Software (BD Biosciences).

[0057] Several approaches are conceivable and required when it comes to interpreting diagnostic assignment of a disease to a defined molecular classification, estimating a prognosis, monitoring or recommending a treatment, molecular pathogenesis and developing new therapeutic concepts. One option is a purely quantitative comparison of the gene expression of various genes in samples from a diseased person and a control person or just of the diseased person's samples prior to, and at various times during a therapy or the course of the disease, e.g. to interpret pathogenesis or develop new treatment concepts. It is more telling for diagnostic interpretation (division into groups and stages, prognostics, therapy and curative effect monitoring) to use algorithms obtained, for example, by linking the expression values of two or more genes. The algorithm may include adding, subtracting, multiplying, dividing, exponential or logarithmic functions as a single operation or constitute a complex of several operations. In this way, (1) the expression data of all or individual genes of a group or (2) the expression data of all or individual genes from various groups can be correlated by an algorithm.

[0058] The tools according to the invention are produced in accordance with the following method:

[0059] The selective cell, tissue, and inflammation-specific molecular tools used in the methods are produced by gene subtraction.

[0060] cDNA is produced by transcribing the mRNA using reverse transcription. The mRNA was taken from inflammatory human blood monocytes or from the inflamed tissue areas that show high macrophage infiltration in patients suffering from inflammatory diseases, and purified either in the conventional way or, alternatively, by positive or negative selection.

[0061] In particular, negative selection is used to prevent activation artefacts that can occur during purification.

[0062] The reverse transcribed single cDNA strands are transcribed into double cDNA strands with DNA polymerase. These are cloned in plasmide and/or phage vectors for differential hybridization or, uni- or bidirectionally, via adapter or linker molecules. After transforming the plasmides or wrapping the phage vectors, differential hybridization is carried out using labeled cDNA probes (radioactivity, digoxigenin, biotin, or others).

[0063] Alternatively, differential expression analysis can be carried out based on the transcribed cDNA by DD or RDA or using classic gene subtraction methods so that the mRNA of the first cell pool is hybridized with the complementary cDNA of the second cell pool. For using the selective differential cDNAs, the cloned units are preferably amplified with NH₂-labeled standard primers for lambda, T3/T7/SP6/M13 and other vector-specific sequences via PCR, and then purified using the column exclusion method. Then the NH₂-labeled DNA is concentrated by precipitation and subsequent centrifugation.

[0064] After coupling the DNA on the modified coupling-capable surface, the probe is hybridized either with cRNA that is directly labeled with dye or with cDNA probes reversely labeled with dye that were taken from patient material (blood or tissue).

[0065] In addition to the immobilization method mentioned above using NH₂-cDNAs, there are also methods for spotting or printing (pin or piezo technique) oligonucleotides or for producing DNA arrays that were synthesized in situ. In this way, DNA array wafers of identical quality and sequence can be produced in parallel for these production techniques. For in-situ synthesis, the individual DNA arrays and the spots thereon are actuated on the wafer by a highly integrated printing mask using Microsystems technology. The number of printing pores per DNA array and their geometry allow high integration densities at a size of <3 μm per DNA chip. In a first step of this microscreen printing technique, the mask is applied to the substrate wafer that is positioned by means of alignment marks. Each printing pore is actuated via a channel using a microfluid system for the actual printing process. The respective sample substance (for example, oligonucleotides with a length of 20 to 50 nucleotides) can react with the chemically reactive and modified wafer surface and forms a covalent bond with the array surface. The mask is removed and rinsed after printing. The cycle can be repeated after repositioning (offset by one respective spot unit). The in-situ method can be used to produce replications of low-scale integrated DNA arrays with 400 spots per unit or large-scale integrated arrays with up to 20,000 spots.

[0066] The invention is based on the consideration that a selective differential gene spot pattern whose underlying sequences were produced using a highly selectioning method can be used on a microarray, the advantages as compared to known DNA arrays being that these can be produced at reduced cost and that analysis is less expensive and takes a smaller effort.

[0067] Blood or tissue-specific RNA molecules from patient samples with chronic inflammatory diseases, bacteria-induced inflammatory diseases, tumors, arteriosclerosis, organ and tissue transplantation and sepsis are bound to the RNA microarrays. Qualitative/quantitative detection of the transcribed quantity of relevant genes is carried out with the species of the selectioned genes, gene sections, or oligomers described in the DNA microarray section. The RNA samples are spotted onto coupling substrates and are composed of total RNA and messenger RNA. The RNA is used as a target for the highly significant expressed genes derived from the DNA microarray that are used as labeled probes for hybridization. It is proposed to couple biotinylized RNA or messenger RNA on glass substrates (slides) coated with streptavidin. After labeling the RNA with biotin derivatives, it is applied by spotting to the glass or plastic slides treated with poly-L-lysine, but preferably coated with streptavidin, and dried. This prevents degradation of the RNA. Alternatively, the RNA can be bonded to reactive substrate materials to achieve a covalent coupling, preferably with UV radiation as a catalyst.

[0068] In addition, multiple, simultaneous labeling of various genes, gene units or oligomers with various labeling species such as radioactivity, fluorescein, digoxigenin and enzymatic labelers is preferred.

[0069] It is possible to label the probes with different fluorochromes at the same time. Enzymatic or radio labeling are potential alternatives. Labeled household genes (alpha, beta, gamma-actin, GAPDH, etc.) are used for quantification and quality control. Detection is preferably carried out in parallel and simultaneously using up to 50 gene probes per batch at the same time.

[0070] In addition to simplifying biometric analysis by coupling RNA species to substrates, this system allows fast diagnoses and provides complex, patient-focused, fast diagnosis, prognosis, and treatment control. The system enables fast performance at high throughputs, in particular, for pharmacological development strategies.

[0071] As this application refers to the phenotypic cell assignment, i.e. the monocyte/macrophage system, and as the genes, gene units or oligomers were pre-selectioned, many approaches and methods can be applied that are reflected in simultaneous or separate applications of DNA/RNA microarrays for the diseases mentioned herein. These methods combine commercial usefulness with usefulness in solving scientific problems.

[0072] The labeling functions of these molecular tools in the DNA microarray/DNA fluorescence cytometric microarray, RNA microarray or reverse transcription polymerase chain reaction (RT-PCR) allow for generating a disease-specific gene expression pattern for each inflammatory process and estimating the relevance of certain biologically active substances and their derivatives as well as for developing new treatment options using conventional chemical pharmaceuticals, pharmaceuticals based on natural substances, antisense RNA, aptamers, ribozymes, or monoclonal antibodies. In addition, species-specific courses of diseases can be recorded or analyzed for all diseases mentioned herein, and the disease-specific treatment can be adjusted individually depending on inflammatory activity.

1. Tools for diagnostic, prognostic and therapy-monitoring analysis as well as for performing screenings for pharmacologically active substances and substance classes of rheumatoid arthritis, chronic inflammatory diseases, bacteria-induced chronic inflammatory diseases, arteriosclerosis, tumors, organ and tissue transplantations, and sepsis,
characterized in that
sequences of a selection of the selective monocyte-macrophage genes listed in Table 1 and/or Table 2 or sequences of all genes listed in Table 1 and/or Table 2 are bonded to the surface of said tool or that RNA complementary to the genes listed is bonded to the surface of said tool.

2. The tools according to claim 1 wherein said genes, partial gene sequences and oligomer sequences are selectioned/subtracted genes.

3. The tools according to claims 1 or 2, characterized in that, alternatively, allels, derivatives and/or splicing variants of the genes, partial gene sequences or oligomer sequences can be present on the tool surface.

4. The tools according to at least one of claims 1 through 3, characterized in that said tools include gene sequences having at least one partial sequence identity in the protein-coding sections of mRNA.

5. The tools according to claim 4, characterized in that said tools include gene sequences having at least 80% of sequence identity in the protein-coding sections of the corresponding nucleic acid.

6. The tools according to claims 1 through 5,
characterized in that they are based on a high-throughput method of DNA array hybridization,
a high-throughput method using fluorescence cytometry (cytometric bead array)
a high-throughput method of RNA array hybridization, or
a high-throughput method using PCR for (semi-) quantification.

7. The tools according to claims 1 through 6, characterized in that the genes have a covalent bond to the surface.

8. The tools according to claims 1 through 7, characterized in that the surface consists of glass or a synthetic material that is chemically activated or modified.

9. The tools according to claim 8, characterized in that their surface is reactively coated with reactive groups that bind amino linkers, with metal compounds, or alloys.

10. The tools according to claims 8 or 9 wherein the substrate material or surface consists of a nylon membrane.

11. The tools according to any one of claims 1 through 10, characterized in that the cDNA was produced by reverse transcription from total RNA or messenger RNA of human cells of the monocyte/macrophage system.

12. The tools according to any one of claims 1 through 10, characterized in that the genes were applied using cDNA spotting methods, immobilization methods and synthesis methods of oligomers or in the form of complementary RNA.

13. The tools according to any one of claims 1 through 12, characterized in that the detection is performed using cDNA, its sequence portions, or oligo probes.

14. The tools according to claim 10, characterized in that the sequences contain deviations.

15. The tools according to claim 11, characterized in that the deviation of cDNA and oligo probes for detection is up to 20%.

16. The tools according to any one of claims 1 through 15, characterized in that the probes for detection are labeled with a fluorochrome, enzyme, protein, or are radio labeled and permit amplification.

17. The tools according to claims 1 through 16, characterized in that coupled biotin, digoxigenin, (noble) metal chelate and protein (molecules) are used for amplification.

18. The tools according to claim 17, characterized in that streptavidin, (noble) metal chelate or antibodies are used for amplification.

19. The tools according to claim 18, characterized in that detection is performed by means of a fluorochrome, radioactivity, or enzymes.

20. The tools according to any one of claims 1 through 19, wherein the tools are formed by a DNA array.

21. The tools according to any one of claims 1 through 19 wherein the tools are formed by a cytofluorescent DNA array (beads).

22. The tools according to any one of claims 1 through 19, wherein the tools are formed by an RNA array that mirrors a DNA array.

23. The tools according to claims 1 through 22, characterized in that the selective genes, their partial sequences or oligomers are used for detecting solid phase bound total RNA or messenger RNA.

24. The tools according to claims 1 through 23, characterized in that the probes are produced by reverse transcription from messenger RNA of human cells of the monocyte/macrophage system.

25. The tools according to any one of claims 1 through 24, characterized in that RNA from up to 500 tissue and/or blood samples is applied to the array.

26. The tool according to any one of claims 1 through 25, characterized in that the probe is labeled with fluorochromes, biotin, digoxigenin, peroxidase, alkaline phosphatase and radioactivity.

27. The tool according to any one of claims 1 through 26, characterized in that detection of the sequences listed is to be carried out using reverse transcription PCR (RT-PCR).

28. The tools according to any one of claims 1 through 27, characterized in that the genes or gene sequences are equipped with a labeling or reporter function so that these can be used for other detection methods.

29. Use of the tools according to any one of claims 1 through 27, characterized in that said tools are used for measuring monocyte/macrophage activation or the inflammatory activity in the blood or in cell tissue.

The application's sequence listing, which the Patent Office published only in electronic form, follows.

SEQUENCE LISTING (1050 sequences)

SEQ ID NO: 1 - DNA, 2943 bp, Homo sapiens
accaggcaacaccattgaaggctcatatgtaaaaatccatgccttcctttctcccaatctccattcccaaacttagccactggcttctggctgaggccttacgcatacctcccggggcttgcacacaccttcttctacagaagacacaccttgggcatatcctacagaagaccaggcttctctctggtccttggtagagggctactttactgtaacagggccagggtggagagttctctcctgaagctccatcccctctataggaaatgtgttgacaatattcagaagagtaagaggatcaagacttctttgtgctcaaataccactgttctcttctctaccctgccctaaccaggagcttgtcaccccaaactctgaggtgatttatgccttaatcaagcaaacttccctcttcagaaaagatggctcattttccctcaaaagttgccaggagctgccaagtattctgccaattcaccctggagcacaatcaacaaattcagccagaacacaactacagctactattagaactattattattaataaattcctctccaaatctagccccttgacttcggatttcacgatttctcccttcctcctagaaacttgataagtttcccgcgcttccctttttctaagactacatgtttgtcatcttataaagcaaaggggtgaataaatgaaccaaatcaataacttctggaatatctgcaaacaacaataatatcagctatgccatctttcactattttagccagtatcgagttgaatgaacatagaaaaatacaaaactgaattcttccctgtaaattccccgttttgacgacgcacttgtagccacgtagccacgcctacttaagacaattacaaaaggcgaagaagactgactcaggcttaagctgccagccagagagggagtcatttcattggcgtttgagtcagcaaagaagtcaagatggccaaagttccagacatgtttgaagacctgaagaactgttacagtgaaaatgaagaagacagttcctccattgatcatctgtctctgaatcagaaatccttctatcatgtaagctatggcccactccatgaaggctgcatggatcaatctgtgtctctgagtatctctgaaacctctaaaacatccaagcttaccttcaaggagagcatggtggtagtagcaaccaacgggaaggttctgaagaagagacggttgagtttaagccaatccatcactgatgatgacctggaggccatcgccaatgactcagaggaagaaatcatcaagcctaggtcagcaccttttagcttcctgagcaatgtgaaatacaactttatgaggatcatcaaatacgaattcatcctgaatgacgccctcaatcaaagtataattcgagccaatgatcagtacctcacggctgctgcattacataatctggatgaagcagtgaaatttgacatgggtgcttataagtcatcaaaggatgatgctaaaattaccgtgattctaagaatctcaaaaactcaattgtatgtgactgcccaagatgaagaccaaccagtgctgctgaaggagatgcctgagatacccaaaaccatcacaggtagtgagaccaacctcctcttcttctgggaaactcacggcactaagaactatttcacatcagttgcccatccaaacttgtttattgccacaaagcaagactactgggtgtgcttggcaggggggccaccctctatcactgactttcagatactggaaaaccaggcgtaggtctggagtctcacttgtctcacttgtgcagtgttgacagttcatatgtaccatgtacatgaagaagctaaatcctttactgttagtcatttgctgagcatgtactgagccttgtaattctaaatgaatgtttacactctttgtaagagtggaaccaacactaacatataatgttgttatttaaagaacaccctatattttgcatagtaccaatcattttaattattattcttcataacaattttaggaggaccagagctactgactatggctaccaaaaagactctacccatattacagatgggcaaattaaggcataagaaaactaagaaatatgcacaatagcagttgaaacaagaagccacagacctaggatttcatgatttcatttcaactgtttgccttctacttttaagttgctgatgaactcttaatcaaatagcataagtttctgggacctcagttttatcattttcaaaatggagggaataatacctaagccttcctgccgcaacagttttttatgctaatcagggaggtcattttggtaaaatacttcttgaagccgagcctcaagatgaaggcaaagcacgaaatgttattttttaattattatttatatatgtatttataaatatatttaagataattataatatactatatttatgggaaccccttcatcctctgagtgtgaccaggcatcctccacaatagcagacagtgttttctgggataagtaagtttgatttcattaatacagggcattttggtccaagttgtgcttatcccatagccaggaaactctgcattctagtacttgggagacctgtaatcatataataaatgtacattaattaccttgagccagtaattggtccgatctttgactcttttgccattaaacttacctgggcattcttgtttcaattccacctgcaatcaagtcctacaagctaaaattagatgaactcaactttgacaaccatgagaccactgttatcaaaactttcttttctggaatgtaatcaatgtttcttctaggttctaaaaattgtgatcagaccataatgttacattattatcaacaatagtgattgatagagtgttatcagtcataactaaataaagcttgcaacaaaattctctgacaaaaaaaaaaaaaaaa

SEQ ID NO: 2 - DNA, 1498 bp, Homo sapiens
accaaacctcttcgaggcacaaggcacaacaggctgctctgggattctcttcagccaatcttcattgctcaagtgtctgaagcagccatggcagaagtacctgagctcgccagtgaaatgatggcttattacagtggcaatgaggatgacttgttctttgaagctgatggccctaaacagatgaagtgctccttccaggacctggacctctgccctctggatggcggcatccagctacgaatctccgaccaccactacagcaagggcttcaggcaggccgcgtcagttgttgtggccatggacaagctgaggaagatgctggttccctgcccacagaccttccaggagaatgacctgagcaccttctttcccttcatctttgaagaagaacctatcttcttcgacacatgggataacgaggcttatgtgcacgatgcacctgtacgatcactgaactgcacgctccgggactcacagcaaaaaagcttggtgatgtctggtccatatgaactgaaagctctccacctccagggacaggatatggagcaacaagtggtgttctccatgtcctttgtacaaggagaagaaagtaatgacaaaatacctgtggccttgggcctcaaggaaaagaatctgtacctgtcctgcgtgttgaaagatgataagcccactctacagctggagagtgtagatcccaaaaattacccaaagaagaagatggaaaagcgatttgtcttcaacaagatagaaatcaataacaagctggaatttgagtctgcccagttccccaactggtacatcagcacctctcaagcagaaaacatgcccgtcttcctgggagggaccaaaggcggccaggatataactgacttcaccatgcaatttgtgtcttcctaaagagagctgtacccagagagtcctgtgctgaatgtggactcaatccctagggctggcagaaagggaacagaaaggtttttgagtacggctatagcctggactttcctgttgtctacaccaatgcccaactgcctgccttagggtagtgctaagaggatctcctgtccatcagccaggacagtcagctctctcctttcagggccaatccccagcccttttgttgagccaggcctctctcacctctcctactcacttaaagcccgcctgacagaaaccacggccacatttggttctaagaaaccctctgtcattcgctcccacattctgatgagcaaccgcttccctatttatttatttatttgtttgtttgttttattcattggtctaatttattcaaagggggcaagaagtagcagtgtctgtaaaagagcctagtttttaatagctatggaatcaattcaatttggactggtgtgctctctttaaatcaagtcctttaattaagactgaaaatatataagctcagattatttaaatgggaatatttataaatgagcaaatatcatactgttcaatggttctgaaataaacttcactgaag

SEQ ID NO: 3 - DNA, 8019 bp, Homo sapiens
tcgtcgaaaatacatagacggatcacagtgcacggctgcggatagggagcagtggcttcgtttcatgcaggaaagagaacttggttcaggagtgtctacgttgcttaagacaggagagcactaaaaatgaaaccatccagccatcctcccccattttcattttcacaccaaagaatcccaccgcggcagaggaccaccgtctctctgtttagacaatcggtgaagaatggatgacctcactttccccaacaggcgggtcctgaaatgttatgcacgaaacaaaacttgagtaaatgcccaacagaggtcactgttttatcgatcttgaagagatctcttcttagcaaagcaaagaaaccgattgtgaaggtaacaccatgtttggtaaataagtgttttggtgttgtgcaagggtctggtttcagcctgaagccatctcagagctgtctgggtctctggagactggagggacaacctagtctagagcccatttgcatgagaccaaggatcctcctgcaagagacaccatcctgagggaagagggcttctgaaccagcttgacccaataagaaattcttgggtgccgacgcggaagcagattcagagcctagagccgtgcctgcgtccgtagtttccttctagcttcttttgatttcaaatcaagacttacagggagagggagcgataaacacaaactctgcaagatgccacaaggtcctcctttgacatccccaacaaagaggtgagtagtattctccccctttctgccctgaaccaagtgggcttcagtaatttcagggctccaggagacctggggcccatgcaggtgccccagtgaaacagtggtgaagagactcagtggcaatggggagagcactggcagcacaaggcaaacctctggcacagagagcaaagtcctcactgggaggattcccaaggggtcacttgggagagggcagggcagcagccaacctcctctaagtgggctgaagcaggtgaagaaagtggcagaagccacgcggtggcaaaaaggagtcacacactccacctggagacgccttgaagtaactgcacgaaatttgagggtggccaggcagttctacaacagccgctcacagggagagccagaacacagaagaactcagatgactggtagtattaccttcttcataatcccaggcttggggggctgcgatggagtcagaggaaactcagttcagaacatctttggtttttacaaatacaaattaactggaacgctaaattctagcctgttaatctggtcactgaaaaaaaattttttttttttcaaaaaacatagctttagcttattttttttctctttgtaaaacttcgtgcatgacttcagctttactctttgtcaagacatgccaaagtgctgagtcactaataaaagaaaaaaagaaagtaaaggaagagtggttctgcttcttagcgctagcctcaatgacgacctaagctgcacttttccccctagttgtgtcttgcgatgctaaaggacgtcacattgcacaatcttaataaggtttccaatcagccccacccgctctggccccaccctcaccctccaacaaagatttatcaaatgtgggattttcccatgagtctcaatattagagtctcaacccccaataaatataggactggagatgtctgaggctcattctgccctcgagcccaccgggaacgaaagagaagctctatctcccctccaggagcccagctatgaactccttctccacaagtaagtgcaggaaatccttagccctggaactgccagcggcggtcgagccctgtgtgagggaggggtgtgtggcccagggagggctggcgggcggccagcagcagaggcaggctcccagctgtgctgtcagctcacccctgcgctcgctcccctccggcacaggcgccttcggtccagttgccttctccctggggctgctcctggtgttgcctgctgccttccctgccccagtacccccaggagaagattccaaagatgtagccgccccacacagacagccactcacctcttcagaacgaattgacaaacaaattcggtacatcctcgacggcatctcagccctgagaaaggaggtgggtaggcttggcgatggggttgaagggcccggtgcgcatgcgttccccttgcccctgcgtgtggccgggggctgcctgcattaggaggtctttgctgggttctagagcactgtagatttgaggccaacggggccgactagactgacttctgtatttatcctttgctggtgtcaggaggttcctttcctttctggaaaatgcagaatgggtctgaaatccatgcccacctttggcatgagctgagggttattgcttctcagggcttccttttccctttccaaaaaattaggtctgtgaagctcctttttgtcccccgggctttggaaggactagaaaagtgccacctgaaaggcatgttcagcttctcagagcagttgcagtactttttggttatgtaaactcaatggttaggattcctcaaagccattccagctaagattcatacctcagagcccaccaaagtggcaaatcataaataggttaaagcatctccccactttcaatgcaaggtattttggtcctgtttggtagaaagaaaagaacacaggaggggagattgggagcccacactcgaattctggttctgccaaaccagccttgtgatcttgggtaaattccctaccacctctggactccatcagtaaaattgggggtggactaggtgatctcatagatccttcctgctggaacattctatggcttgaattatattctcctaattattgtcaaaattgctgttattaagtatctactgtgtgccaggcactttaaataaatattgtgtctaatcttcaaaacaaatttgcaaggaaggtttttggagataaggaaactgagactcaggattaagtaacacacctaaagtcaaaggtgagcttggaactgaacccaagtgtgcccccactccactggaatttgcttgccaggatgccaatgagttgtagcttcatttttcttagagactttcctggctgtggttgaacaatgaaaaggccctctagtggtgtttgttttagggacacttaggtgataacaattctggtattctttcccagacatgtaacaagagtaacatgtgtgaaagcagcaaagaggcactggcagaaaacaacctgaaccttccaaagatggctgaaaaagatggatgcttccaatctggattcaatgaggtaccaacttgtcgcactcacttttcactattccttaggcaaaacttctccctcttgcatgcagtgcctgtatacatatagatccaggcagcaacaaaaagtgggtaaatgtaaagaatgttatgtaaatttcatgaggaggccaacttcaagcttttttaaaggcagtttattcttggacaggtatggccagagatggtgccactgtggtgagattttaacaactgtcaaatgtttaaaactcccacaggtttaattagttcatcctgggaaaggtactcgcagggccttttccctctctggctgcccctggcagggtccaggtctgccctccctccctgcccagctcattctccacagtgagataacctgcactgtcttctgattattttataaaaggaggttccagcccagcattaacaagggcaagagtgcaggaagaacatcaagggggacaatcagagaaggatccccattgccacattctagcatctgttgggctttggataaaactaattacatggggcctctgattgtccagttatttaaaatggtgctgtccaatgtcccaaaacatgctgcctaagaggtacttgaagttctctagaggagcagagggaaaagatgtcgaactgtggcaattttaacttttcaaattgattctatctcctggcgataaccaattttcccaccatctttcctcttaggagacttgcctggtgaaaatcatcactggtcttttggagtttgaggtatacctagagtacctccagaacagatttgagagtagtgaggaacaagccagagctgtgcagatgagtacaaaagtcctgatccagttcctgcagaaaaaggtgggtgtgtcctcattccctcaacttggtgtgggggaagacaggctcaaagacagtgtcctggacaactcagggatgcaatgccacttccaaaagagaaggctacacgtaaacaaaagagtctgagaaatagtttctgattgttattgttaaatctttttttgtttgtttggttggttggctctcttctgcaaaggacatcaataactgtattttaaactatatattaactgaggtggattttaacatcaatttttaatagtgcaagagatttaaaaccaaaggcgggggggcgggcagaaaaaagtgcatccaactccagccagtgatccacagaaacaaagaccaaggagcacaaaatgattttaagattttagtcattgccaagtgacattcttctcactgtggttgtttcaattctttttcctaccttttaccagagagttagttcagagaaatggtcagagactcaagggtggaaagaggtaccaaaggctttggccaccagtagctggctattcagacagcagggagtagacttgctggctagcatgtggaggagccaaagctcaataagaaggggcctagaatgaaacccttggtgctgatcctgcctctgccatttctacttaagccagggtttctcatatgttaacatgcatgggaattccctgggcatcttcttgtggtgtggagtctgacttagcaagcctcgggtgggtttgagggtcaaatttctaccaggcttatatccctggtgatgctgcagaattccaggaccacacttggaggtttaaggccttccacaagttacttatcccatatggtgggtctatggaaaggtgtttcccagtcctctttacaccaccagatcagtggtctttcaacagatcctaaagggatggtgagagggaaactggagaaaagtatcagatttagaggccactgaagaacccatattaaaatgcctttaagtatgggctcttcattcatatactaaatatgaactatgtgccaggcattatttcatatgacagaatacaaacaaataagatagtgatgctggtcaggcttggtggctcatgcctgtattccctaaactttgggagcctaaggtgagaactccttgaactcctaaggccaggagttcaagaccagcctggataacatagcaagaccccatctctacaaaaaaccaaaaccaaacaaacaaaaatgatagtggtgcttccctcaggatgcttgtggtctaatgggagacagaacagcaaagggatgattagaagttggttgctgtgagccaggcacagtgctgatataatcccagcgctatgggaggctgaggtgggtggatcatttgaggccaggagtttaagaccagcctggtcaacatggtaaaaccccatctctacttaaaaatacaaaaaagttagccaggcatggtggcatacacctgtaacccagctactcaggaggctgaggcacatgaatcacttgaacccaggaggcagaggttgctgtgcaccactgcactccagcctgggtgacagaacgagaccttgactcaaaaaaaaaaaaaagaagtttgttgctatggaagggtcctactcagagcaggcaccccagttaatctcattcaccccacatttcacatttgaacatcatcccatagcccagagcatccctccactgcaaaggatttattcaacatttaaacaatcctttttactttcattttccttcaggcaaagaatctagatgcaataaccacccctgacccaaccacaaatgccagcctgctgacgaagctgcaggcacagaaccagtggctgcaggacatgacaactcatctcattctgcgcagctttaaggagttcctgcagtccagcctgagggctcttcggcaaatgtagcatgggcacctcagattgttgttgttaatgggcattccttcttctggtcagaaacctgtccactgggcacagaacttatgttgttctctatggagaactaaaagtatgagcgttaggacactattttaattatttttaatttattaatatttaaatatgtgaagctgagttaatttatgtaagtcatatttatatttttaagaagtaccacttgaaacattttatgtattagttttgaaataataatggaaagtggctatgcagtttgaatatcctttgtttcagagccagatcatttcttggaaagtgtaggcttacctcaaataaatggctaacttatacatatttttaaagaaatatttatattgtatttatataatgtataaatggtttttataccaataaatggcattttaaaaaattcagcaactttgagtgtgtcacgtgaagcttaatataaacaagtttcttgtcactgccaccaccacgaccaaaaaaagctaatcaatcactatatataatacatatatatactatatataataaatatatatactatatataatacatatatacactatatataatacatatatactatatatacacatatatactatatatacacatatatattatgaatgtatatatatagtatatatagtatatatactatgtatgtatatatatagtatatatagtatatatactatgtatgtgtatatatagtatatatagtatatatagtatatatactatgtatgtatatatatagtatatatagtatatatactgtgtatgtatatatatagtatatatatactatatatgcatacatagtatatatgcatatatactatatatactatatatttatatatactatatactatatatactatatactgtatatatactatatatgtatgtatacgatatatatatatactatatatgtacacacacacatatatatatacatataagcacctactacatgccaggcatcattaaatgtgttgcatccatcacgtcatttaaccccagcacttgcacactcctttctggttgtggaagactaagtaatttatctaagtcacccagctggaaggtcaggcagggacccagatttgaaatccaagtctacctacctacaggtcccctactcttaacctgtaggtcccactgcctacccaggaactgagggatgatgtagaaaatcccaaaacatgttaatatagggaatacctataaacatgcaatcaaagtctttgggactatacaaccactgtataaagcataacaatgtacaagcttccaaacaataactagaagttctgcctccctcttctgggttcctaaagcactgcacctatctacctgtcaaagcatctaccacattgtaccacaccttaaaatcaatggtttttttcttctcagccagcatgtggatgcctcaataaagcagactcctttcatgacctaaaactaatttcaggggggaaaaaaagacgagctgggcgcagtggctcacgcctataatcccagcactttgggaggctgaggcgggaggatcacttgaggtcagaagaccagcctggcccaacatggcaaaaccccgtctctactaaaaatacaaaaattagctgggcgtggtggcgcacctataatcccagctactcaggaagctgagacatgataatcgcttgagcctgggaggtagagcctggggctgcactccatcctgggcaacagagggagattctgtctcaaaaaataataataataatataaataaataaataatttttttaaaaaaagactctttcctatattaatctttgcatcctgtgcccatggccccaaacctgaccaatgaaggccccagtaaatattttttgaacaaaagaaaatatagatgatcaaagataagaaagataagaagacacctcaattcttgta

SEQ ID NO: 4 - DNA, 1666 bp, Homo sapiens
ctccataaggcacaaactttcagagacagcagagcacacaagcttctaggacaagagccaggaagaaaccaccggaaggaaccatctcactgtgtgtaaacatgacttccaagctggccgtggctctcttggcagccttcctgatttctgcagctctgtgtgaaggtgcagttttgccaaggagtgctaaagaacttagatgtcagtgcataaagacatactccaaacctttccaccccaaatttatcaaagaactgagagtgattgagagtggaccacactgcgccaacacagaaattattgtaaagctttctgatggaagagagctctgtctggaccccaaggaaaactgggtgcagagggttgtggagaagtttttgaagagggctgagaattcataaaaaaattcattctctgtggtatccaagaatcagtgaagatgccagtgaaacttcaagcaaatctacttcaacacttcatgtattgtgtgggtctgttgtagggttgccagatgcaatacaagattcctggttaaatttgaatttcagtaaacaatgaatagtttttcattgtaccatgaaatatccagaacatacttatatgtaaagtattatttatttgaatctacaaaaaacaacaaataatttttaaatataaggattttcctagatattgcacgggagaatatacaaatagcaaaattgaggccaagggccaagagaatatccgaactttaatttcaggaattgaatgggtttgctagaatgtgatatttgaagcatcacataaaaatgatgggacaataaattttgccataaagtcaaatttagctggaaatcctggatttttttctgttaaatctggcaaccctagtctgctagccaggatccacaagtccttgttccactgtgccttggtttctcctttatttctaagtggaaaaagtattagccaccatcttacctcacagtgatgttgtgaggacatgtggaagcactttaagttttttcatcataacataaattattttcaagtgtaacttattaacctatttattatttatgtatttatttaagcatcaaatatttgtgcaagaatttggaaaaatagaagatgaatcattgattgaatagttataaagatgttatagtaaatttattttattttagatattaaatgatgttttattagataaatttcaatcagggtttttagattaaacaaacaaacaattgggtacccagttaaattttcatttcagataaacaacaaataattttttagtataagtacattattgtttatctgaaattttaattgaactaacaatcctagtttgatactcccagtcttgtcattgccagctgtgttggtagtgctgtgttgaattacggaataatgagttagaactattaaaacagccaaaactccacagtcaatattagtaatttcttgctggttgaaacttgtttattatgtacaaatagattcttataatattatttaaatgactgcatttttaaatacaaggctttatatttttaactttaagatgtttttatgtgctctccaaattttttttactgtttctgattgtatggaaatataaaagtaaatatgaaacatttaaaatataatttgttgtcaaagtaaaaaaaaaaaaaaa

SEQ ID NO: 5 - DNA, 516 bp, Homo sapiens
agcccaggccagggcacccagtctgagaacagctgcacccacttcccaggcaacctgcctaacatgcttcgagatctccgagatgccttcagcagagtgaagactttctttcaaatgaaggatcagctggacaacttgttgttaaaggagtccttgctggaggacttaaagggttacctgggttgccaagccttgtctgagatgatccagttttacctggaggaggtgatgccccaagctgagaaccaagacccagacatcaaggcgcatgtgaactccctgggggagaacctgaagaccctcaggctgaggctacggcgctgtcatcgatttcttccctgtgaaaacaagagcaaggccgtggagcaggtgaagaatgcctttaataagctccaagagaaaggcatctacaaagccatgagtgagtttgacatcttcatcaactacatagaagcctacatgacaatgaagatacgaaactgagacatcagggtggcgactctatagactctagga

SEQ ID NO: 6 - DNA, 1572 bp, Homo sapiens
cgggtaattttttcaaagtaaacgcttcgggccccgcgggacactcagctaagagcccggccgggctccgaggcgagaggctgcatggagtggccggcgcggctctgcgggctgtgggcgctgctgctctgcgccggcggcgggggcgggggcgggggcgccgcgcctacggaaactcagccacctgtgacaaatttgagtgtctctgttgaaaacctctgcacagtaatatggacatggaatccacccgagggagccagctcaaattgtagtctatggtattttagtcattttggcgacaaacaagataagaaaatagctccggaaactcgtcgttcaatagaagtacccctgaatgagaggatttgtctgcaagtggggtcccagtgtagcaccaatgagagtgagaagcctagcattttggttgaaaaatgcatctcacccccagaaggtgatcctgagtctgctgtgattgagcttcaatgcatttggcacaacctgagctacatgaagtgttcttggctccctggaaggaataccagtcccgacactaactatactctctactattggcacagaagcctggaaaaaattcatcaatgtgaaaacatctttagagaaggccaatactttggttgttcctttgatctgaccaaagtgaaggattccagttttgaacaacacagtgtccaaataatggtcaaggataatgcaggaaaaattaaaccatccttcaatatagtgcctttaacttcccgtgtgaaacctgatcctccacatattaaaaacctctccttccacaatgatgacctatatgtgcaatgggagaatccacagaattttattagcagatgcctattttatgaagtagaagtcaataacagccaaactgagacacataatgttttctacgtccaagaggctaaatgtgagaatccagaatttgagagaaatgtggagaatacatcttgtttcatggtccctggtgttcttcctgatactttgaacacagtcagaataagagtcaaaacaaataagttatgctatgaggatgacaaactctggagtaattggagccaagaaatgagtataggtaagaagcgcaattccacactctacataaccatgttactcattgttccagtcatcgtcgcagatgcaatcatagtactcctgctttacctaaaaaggctcaagattattatattccctccaattcctgatcctggcaagatttttaaagaaatgtttggagaccagaatgatgatactctgcactggaagaagtacgacatctatgagaagcaaaccaaggaggaaaccgactctgtagtgctgatagaaaacctgaagaaagcctctcagtgatggagataatttatttttaccttcactgtgaccttgagaagattcttcccattctccatttgttatctgggaacttattagatggaaactgaaactactgcaccatttaaaaacaggcagctcataagagccacaggtctttatgttgagtcgctagcaagaacaagaaaagttttaaagaaagatgttgcttactatgagtgg

SEQ ID NO: 7 - DNA, 1199 bp, Homo sapiens
gtccggcgccccccgggagggaactgggtggccgcaccctcccggctgcggtggctgtcgccccccaccctgcagccaggactcgatggagaatccattccaatatatggccatgtggctctttggagcaatgttccatcatgttccatgctgctgacgtcacatggagcacagaaatcaatgttagcagatagccagcccatacaagatcgtattgtattgtaggaggcattgtggatggatggctgctggaaaccccttgccatagccagctcttcttcaatacttaaggatttaccgtggctttgagtaatgagaatttcggaaaccacatttgagaagtatttccatccagtgctacttgtgtttacttctaaacagtcattttctaactgaagctggcattcatgtcttcattttgggctgtttcagtgcagggcttcctaaaacagaagccaactgggtgaatgtaataagtgatttgaaaaaaattgaagatcttattcaatctatgcatattgatgctactttatatacggaaagtgatgttcaccccagttgcaaagtaacagcaatgaagtgctttctcttggagttacaagttatttcacttgagtccggagatgcaagtattcatgatacagtagaaaatctgatcatcctagcaaacaacagtttgtcttctaatgggaatgtaacagaatctggatgcaaagaatgtgaggaactggaggaaaaaaatattaaagaatttttgcagagttttgtacatattgtccaaatgttcatcaacacttcttgattgcaattgattctttttaaagtgtttctgttattaacaaacatcactctgctgcttagacataacaaaacactcggcatttcaaatgtgctgtcaaaacaagtttttctgtcaagaagatgatcagaccttggatcagatgaactcttagaaatgaaggcagaaaaatgtcattgagtaatatagtgactatgaacttctctcagacttactttactcatttttttaatttattattgaaattgtacatatttgtggaataatgtaaaatgttgaataaaaatatgtacaagtgttgttttttaagttgcactgatattttacctcttattgcaaaatagcatttgtttaagggtgatagtcaaattatgtattggtggggctgggtaccaatgct

SEQ ID NO: 8 - DNA, 393 bp, Homo sapiens
atgcctgacctcaactcctccactgactctgcagcctcagcctctgcagccagtgatgtttctgtagaatctacagcagaggccacagtctgcacggtgacactggagaagatgtcggcagggctgggcttcagcctggaaggagggaagggctccctacacggagacaagcccctcaccattaacaggattttcaaaggagcagcctcagaacaaagtgagacagtccagcctggagatgaaatcttgcagctgggtggcactgccatgcagggcctcacacggtttgaagcctggaacatcatcaaggcactgcctgatggacctgtcacgattgtcatcaggagaaaaagcctccagtccaaggaaaccacagctgctggagactcctag

SEQ ID NO: 9 - DNA, 471 bp, Homo sapiens
tactttggcaagcttgaatctaaattatcagtcataagaaatttgaatgaccaagttctcttcattgaccaaggaaatcggcctctatttgaagatatgactgattctgactgtagagataatgcaccccggaccatatttattataagtatgtataaagatagccagcctagaggtatggctgtaactatctctgtgaagtgtgagaaaatttcaactctctcctgtgagaacaaaattatttcctttaaggaaatgaatcctcctgataacatcaaggatacaaaaagtgacatcatattctttcagagaagtgtcccaggacatgataataagatgcaatttgaatcttcatcatacgaaggatactttctagcttgtgaaaaagagagagacctttttaaactcattttgaaaaaagaggatgaattgggggatagatctataatgttcactgttcaaaacgaagac

SEQ ID NO: 10 - DNA, 2005 bp, Homo sapiens
acaaaagatgctgaaaaagcctctctcagctgtgacctggctctgcattttcatcgtggcctttgtcagccacccagcgtggctgcagaagctctctaagcacaagacaccagcacagccacagctcaaagcggccaactgctgtgaggaggtgaaggagctcaaggcccaagttgccaaccttagcagcctgctgagtgaactgaacaagaagcaggagagggactgggtcagcgtggtcatgcaggtgatggagctggagagcaacagcaagcgcatggagtcgcggctcacagatgctgagagcaagtactccgagatgaacaaccaaattgacatcatgcagctgcaggcagcacagacggtcactcagacctccgcagatgccatctacgactgctcttccctctaccagaagaactaccgcatctctggagtgtataagcttcctcctgatgacttcctgggcagccctgaactggaggtgttctgtgacatggagacttcaggcggaggctggaccatcatccagagacgaaaaagtggccttgtctccttctaccgggactggaagcagtacaagcagggctttggcagcatccgtggggacttctggctggggaacgaacacatccaccggctctccagacagccaacccggctgcgtgtagagatggaggactgggagggcaacctgcgctacgctgagtatagccactttgttttgggcaatgaactcaacagctatcgcctcttcctggggaactacactggcaatgtggggaacgacgccctccagtatcataacaacacagccttcagcaccaaggacaaggacaatgacaactgcttggacaagtgtgcacagctccgcaaaggtggctactggtacaactgctgcacagactccaacctcaatggagtgtactaccgcctgggtgagcacaataagcacctggatggcatcacctggtatggctggcatggatctacctactccctcaaacgggtggagatgaaaatccgcccagaagacttcaagccttaaaaggaggctgccgtggagcacggatacagaaactgagacacgtggagactggatgagggcagatgaggacaggaagagagtgttagaaagggtaggactgagaaacagcctataatctccaaagaaagaataagtctccaaggagcacaaaaaaatcatatgtaccaaggatgttacagtaaacaggatgaactatttaaacccactgggtcctgccacatccttctcaaggtggtagactgagtggggtctctctgcccaagatccctgacatagcagtagcttgtcttttccacatgatttgtctgtgaaagaaaataattttgagatcgttttatctattttctctacggcttaggctatgtgagggcaaaacacaaatccctttgctaaaaagaaccatattattttgattctcaaaggataggcctttgagtgttagagaaaggagtgaaggaggcaggtgggaaatggtatttctatttttaaatccagtgaaattatcttgagtctacacattatttttaaaacacaaaaattgttcggctggaactgacccaggctggacttgcggggaggaaactccagggcactgcatctggcgatcagactctgagcactgcccctgctcgccttggtcatgtacagcactgaaaggaatgaagcaccagcaggaggtggacagagtctctcatggatgccggcacaaaactgccttaaaatattcatagttaatacaggtatatctatttttatttactttgtaagaaacaagctcaaggagcttccttttaaattttgtctgtaggaaatggttgaaaactgaaggtagatggtgttatagttaataataaatgctgtaaataagcatctcactttgtaaaaataaaatattgtggttttgttttaaacattcaacgtttcttttccttctacaataaacactttcaaaatgtg

SEQ ID NO: 11 - DNA, 2237 bp, Homo sapiens
cttgtggagcattcgggcttggaaggaaagctataggctacccattcagctcccctgtcagagactcaagctttgagaaaggctagcaaagagcaaggaaagagagaaaacaacaaagtggcgaggccctcagagtgaaagcgtaaggttcagtcagcctgctgcagctttgcagacctcagctgggcatctccagactcccctgaaggaagagccttcctcacccaaacccacaaaagatgctgaaaaagcctctctcagctgtgacctggctctgcattttcatcgtggcctttgtcagccacccagcgtggctgcagaagctctctaagcacaagacaccagcacagccacagctcaaagcggccaactgctgtgaggaggtgaaggagctcaaggcccaagttgccaaccttagcagcctgctgagtgaactgaacaagaagcaggagagggactgggtcagcgtggtcatgcaggtgatggagctggagagcaacagcaagcgcatggagtcgcggctcacagatgctgagagcaagtactccgagatgaacaaccaaattgacatcatgcagctgcaggcagcacagacggtcactcagacctccgcagatgccatctacgactgctcttccctctaccagaagaactaccgcatctctggagtgtataagcttcctcctgatgacttcctgggcagccctgaactggaggtgttctgtgacatggagacttcaggcggaggctggaccatcatccagagacgaaaaagtggccttgtctccttctaccgggactggaagcagtacaagcagggctttggcagcatccgtggggacttctggctggggaacgaacacatccaccggctctccagacagccaacccggctgcgtgtagagatggaggactgggagggcaacctgcgctacgctgagtatagccactttgttttgggcaatgaactcaacagctatcgcctcttcctggggaactacactggcaatgtggggaacgacgccctccagtatcataacaacacagccttcagcaccaaggacaaggacaatgacaactgcttggacaagtgtgcacagctccgcaaaggtggctactggtacaactgctgcacagactccaacctcaatggagtgtactaccgcctgggtgagcacaataagcacctggatggcatcacctggtatggctggcatggatctacctactccctcaaacgggtggagatgaaaatccgcccagaagacttcaagccttaaaaggaggctgccgtggagcacggatacagaaactgagacacgtggagactggatgagggcagatgaggacaggaagagagtgttagaaagggtaggactgagaaacagcctataatctccaaagaaagaataagtctccaaggagcacaaaaaaatcatatgtaccaaggatgttacagtaaacaggatgaactatttaaacccactgggtcctgccacatccttctcaaggtggtagactgagtggggtctctctgcccaagatccctgacatagcagtagcttgtcttttccacatgatttgtctgtgaaagaaaataattttgagatcgttttatctattttctctacggcttaggctatgtgagggcaaaacacaaatccctttgctaaaaagaaccatattattttgattctcaaaggataggcctttgagtgttagagaaaggagtgaaggaggcaggtgggaaatggtatttctatttttaaatccagtgaaattatcttgagtctacacattatttttaaaacacaaaaattgttcggctggaactgacccaggctggacttgcggggaggaaactccagggcactgcatctggcgatcagactctgagcactgcccctgctcgccttggtcatgtacagcactgaaaggaatgaagcaccagcaggaggtggacagagtctctcatggatgccggcacaaaactgccttaaaatattcatagttaatacaggtatatctatttttatttactttgtaagaaacaagctcaaggagcttccttttaaattttgtctgtaggaaatggttgaaaactgaaggtagatggtgttatagttaataataaatgctgtaaataagcatctcactttgtaaaaataaaatattgtggttttgttttaaacattcaacgtttcttttccttctacaataaacactttcaaaatgtg

SEQ ID NO: 12 - DNA, 3516 bp, Homo sapiens
ggatcctggagacaactttgccgtgtgacgcgccgggaggactgcagggcccgcggccgagggctcggcgccgcctgtgagcgggcccgcgcggccggctctcccgggcaccaagcttgctccgcgccactgcccgccggcccgcggcgaggacgacctgcccgtctccgccgccggcggcccttcctggcgcgaggcagtgagggcgaggcgctcaggtgcgagcgcggggccccgccgcagcgcccgccgcagcgccgcgccaagccgcgcccggctccgctccggggggctccagcgccttcgcttccgtctcagccaagttgcgtggacccgctctttcgccaccttccccagccgccggccgaaccgccgctcccactgacgctgctttcgcttcacccgaaccggggctgcggggcccccgacgcggaaaggatggggagaaggctgcagatgccgaggcgccccgagacgcccgtgcggcagtgacccgcgacctccgccccgcccggcgcgcccctcgggcccccggggccctcggcgccccttccctgccgcgcgggaacccccgaggcccggccggccccctccccctgcgagccggcggcagccctcccggcgggcgggcgggcggaggcccgggcgggcgcgggcgcgggcgggggcggggcggggcggcgcgcccggagcccggagcccggccctgcgctcggctcgactcggctcgcctcgcggcgggcgccctcgtcgccagcggcgcaccatggacgggctgcccggtcgggcgctgggggccgcctgccttctgctgctggcggccggctggctggggcctgaggcctggggctcacccacgcccccgccgacgcctgccgcgccgccgccacccccgccacccggagccccgggtggctcgcaggacacctgtacgtcgtgcggcggcttccggcggccagaggagctcggccgagtggacggcgacttcctggaggcggtgaagcggcacatcttgagccgcctgcagatgcggggccggcccaacatcacgcacgccgtgcctaaggccgccatggtcacggccctgcgcaagctgcacgcgggcaaggtgcgcgaggacggccgcgtggagatcccgcacctcgacggccacgccagcccgggcgccgacggccaggagcgcgtttccgaaatcatcagcttcgccgagacagatggcctcgcctcctcccgggtccgcctatacttcttcatctccaacgaaggcaaccagaacctgtttgtggtccaggccagcctgtggctttacctgaaactcctgccctacgtcctggagaagggcagccggcggaaggtgcgggtcaaagtgtacttccaggagcagggccacggtgacaggtggaacatggtggagaagagggtggacctcaagcgcagcggctggcataccttcccactcacggaggccatccaggccttgtttgagcggggcgagcggcgactcaacctagacgtgcagtgtgacagctgccaggagctggccgtggtgccggtgttcgtggacccaggcgaagagtcgcaccgaccctttgtggtggtgcaggctcggctgggcgacagcaggcaccgcattcgcaagcgaggcctggagtgcgatggccggaccaacctctgttgcaggcaacagttcttcattgacttccgcctcatcggctggaacgactggatcatagcacccaccggctactacggcaactactgtgagggcagctgcccagcctacctggcaggggtccccggctctgcctcctccttccacacggctgtggtgaaccagtaccgcatgcggggtctgaaccccggcacggtgaactcctgctgcattcccaccaagctgagcaccatgtccatgctgtacttcgatgatgagtacaacatcgtcaagcgggacgtgcccaacatgattgtggaggagtgcggctgcgcctgacagtgcaaggcaggggcacggtggtggggcacggagggcagtcccgggtgggcttcttccagccccccgcgggaacggggtacacggtgggctgagtacagtcattctgttgggctgtggagatagtgccagggtgcggcctgagatatttttctacagcttcatagagcaaccagtcaaaaccagagcgagaaccctcaactgacatgaaatactttaaaatgcacacgtagccacgcacagccagacgcatcctgccacccacacagcagcctccaggataccagcaaatggatgcggtgacaaatggcagcttagctacaaatgcctgtcagtcggagagaatggggtgagcagccaccattccaccagctggcccggccacgtctcgaagttgcgccttcccgagcacacataaaagcacaaagacagagacgcagagagagagagagagccacggagaggaaaagcagatgcaggggtggggagcgcagctcggcggaggctgcgtgtgccccgtggcttttaccaggcctgctctgcctggctcgatgtctgcttcttcccagcctgggatccttcgtgcttcaaggcctggggagcctgtccttccatgcccttgtcgagggaaagagacccagaaaggacacaacccgtcagagacctgggagcaggggcaatgaccgtttgactgtttgtggcttgggcctctgacatgacttatgtgtgtgtgtgtttttggggtggggagggagggagagaagagggggctaaatttgatgctttaactgatctccaacagttgacaggtcatccttgccagttgtataactgaaaaaggacttttctaccaggtatgaccttttaagtgaaaatctgaattgttctaaatggaaagaaaaaaagttgcaatctgtgcccttcattggggacattcctctaggactggtttggggacgggtgggaatgacccctaggcaaggggatgagaccgcaggaggaaatggcggggaggtggcattcttgaactgctgaggatggggggtgtcccctcagcggaggccaagggaggggagcagcctagttggtcttggagagatggggaaggctttcagctgatttgcagaagttgcccatgtgggcccaaccatcagggctggccgtggacgtggcccctgcccactcacctgcccgcctgcccgcccgcccgcatagcacttgcagacctgcctgaacgcacatgacatagcacttgccgatctgcgtgtgcccagaagtggcccttggccgagcgccgaactcgctcgccctctagatgtccaagtgccacgtgaactatgcaatttaaagggttgacccacactagacgaaactggactcgtacgactctttttatattttttatacttgaaatgaaatcctttgcttcttttttaagcgaatgattgcttttaatgtttgcactgatttagttgcatgattagtcagaaactgccatttgaaaaaaaagttatttttatagcagc

SEQ ID NO: 13 - DNA, 1386 bp, Homo sapiens
gccccatctccttgggctgcccgtgcttcgtgctttggactaccgcccagcagtgtcctgccctctgcctgggcctcggtccctcctgcacctgctgcctggatccccggcctgcctgggcctgggccttggttctccccatgacaccacctgaacgtctcttcctcccaagggtgtgtggcaccaccctacacctcctccttctggggctgctgctggttctgctgcctggggcccaggggctccctggtgttggcctcacaccttcagctgcccagactgcccgtcagcaccccaagatgcatcttgcccacagcaccctcaaacctgctgctcacctcattggagaccccagcaagcagaactcactgctctggagagcaaacacggaccgtgccttcctccaggatggtttctccttgagcaacaattctctcctggtccccaccagtggcatctacttcgtctactcccaggtggtcttctctgggaaagcctactctcccaaggccacctcctccccactctacctggcccatgaggtccagctcttctcctcccagtaccccttccatgtgcctctcctcagctcccagaagatggtgtatccagggctgcaggaaccctggctgcactcgatgtaccacggggctgcgttccagctcacccagggagaccagctatccacccacacagatggcatcccccacctagtcctcagccctagtactgtcttctttggagccttcgctctgtagaacttggaaaaatccagaaagaaaaaataattgatttcaagaccttctccccattctgcctccattctgaccatttcaggggtcgtcaccacctctcctttggccattccaacagctcaagtcttccctgatcaagtcaccggagctttcaaagaaggaattctaggcatcccaggggaccacacctccctgaaccatccctgatgtctgtctggctgaggatttcaagcctgcctaggaattcccagcccaaagctgttggtctgtcccaccagctaggtggggcctagatccacacacagaggaagagcaggcacatggaggagcttgggggatgactagaggcagggaggggactatttatgaaggcaaaaaaattaaattatttatttatggaggatggagagaggggaataatagaagaacatccaaggagaaacagagacaggcccaagagatgaagagtgagagggcatgcgcacaaggctgaccaagagagaaagaagtaggcatgagggatcacagggccccagaaggcagggaaaggctctgaaagccagctgccgaccagagccccacacggaggcatctgcaccctcgatgaagcccaataaacctcttttctctg

SEQ ID NO: 14 - DNA, 1386 bp, Homo sapiens; identical to SEQ ID NO: 13

SEQ ID NO: 15 - DNA, 2741 bp, Homo sapiens
acctccctccgcggagcagccagacagcgagggccccggccgggggcaggggggacgccccgtccggggcacccccccggctctgagccgcccgcggggccggcctcggcccggagcggaggaaggagtcgccgaggagcagcctgaggccccagagtctgagacgagccgccgccgcccccgccactgcggggaggagggggaggaggagcgggaggagggacgagctggtcgggagaagaggaaaaaaacttttgagacttttccgttgccgctgggagccggaggcgcggggacctcttggcgcgacgctgccccgcgaggaggcaggacttggggaccccagaccgcctccctttgccgccggggacgcttgctccctccctgccccctacacggcgtccctcaggcgcccccattccggaccagccctcgggagtcgccgacccggcctcccgcaaagacttttccccagacctcgggcgcaccccctgcacgccgccttcatccccggcctgtctcctgagcccccgcgcatcctagaccctttctcctccaggagacggatctctctccgacctgccacagatcccctattcaagaccacccaccttctggtaccagatcgcgcccatctaggttatttccgtgggatactgagacacccccggtccaagcctcccctccaccactgcgcccttctccctgaggacctcagctttccctcgaggccctcctaccttttgccgggagacccccagcccctgcaggggcggggcctccccaccacaccagccctgttcgcgctctcggcagtgccggggggcgccgcctcccccatgccgccctccgggctgcggctgctgccgctgctgctaccgctgctgtggctactggtgctgacgcctggccggccggccgcgggactatccacctgcaagactatcgacatggagctggtgaagcggaagcgcatcgaggccatccgcggccagatcctgtccaagctgcggctcgccagccccccgagccagggggaggtgccgcccggcccgctgcccgaggccgtgctcgccctgtacaacagcacccgcgaccgggtggccggggagagtgcagaaccggagcccgagcctgaggccgactactacgccaaggaggtcacccgcgtgctaatggtggaaacccacaacgaaatctatgacaagttcaagcagagtacacacagcatatatatgttcttcaacacatcagagctccgagaagcggtacctgaacccgtgttgctctcccgggcagagctgcgtctgctgaggctcaagttaaaagtggagcagcacgtggagctgtaccagaaatacagcaacaattcctggcgatacctcagcaaccggctgctggcacccagcgactcgccagagtggttatcttttgatgtcaccggagttgtgcggcagtggttgagccgtggaggggaaattgagggctttcgccttagcgcccactgctcctgtgacagcagggataacacactgcaagtggacatcaacgggttcactaccggccgccgaggtgacctggccaccattcatggcatgaaccggcctttcctgcttctcatggccaccccgctggagagggcccagcatctgcaaagctcccggcaccgccgagccctggacaccaactattgcttcagctccacggagaagaactgctgcgtgcggcagctgtacattgacttccgcaaggacctcggctggaagtggatccacgagcccaagggctaccatgccaacttctgcctcgggccctgcccctacatttggagcctggacacgcagtacagcaaggtcctggccctgtacaaccagcataacccgggcgcctcggcggcgccgtgctgcgtgccgcaggcgctggagccgctgcccatcgtgtactacgtgggccgcaagcccaaggtggagcagctgtccaacatgatcgtgcgctcctgcaagtgcagctgaggtcccgccccgccccgccccgccccggcaggcccggccccaccccgccccgcccccgctgccttgcccatgggggctgtatttaaggacacccgtgccccaagcccacctggggccccattaaagatggagagaggactgcggatctctgtgtcattgggcgcctgcctggggtctccatccctgacgttcccccactcccactccctctctctccctctctgcctcctcctgcctgtctgcactattcctttgcccggcatcaaggcacaggggaccagtggggaacactactgtagttagatctatttattgagcaccttgggcactgttgaagtgccttacattaatgaactcattcagtcaccatagcaacactctgagatgcagggactctgataacacccattttaaaggtgaggaaacaagcccagagaggttaagggaggagttcctgcccaccaggaacctgctttagtgggggatagtgaagaagacaataaaagatagtagttcaggccaggcggggtggctcacgcctgtaatcctagcacttttgggaggcagagatgggaggattacttgaatccaggcatttgagaccagcctgggtaacatagtgagaccctatctctacaaaacacttttaaaaaatgtacacctgtggtcccagctactctggaggctaaggtgggaggatcacttgatcctgggaggtcaaggctgcag

SEQ ID NO: 16 - DNA, 2745 bp, Homo sapiens
acctccctccgcggagcagccagacagcgagggccccggccgggggcaggggggacgccccgtccggggcaccccccccggctctgagccgcccgcggggccggcctcggcccggagcggaggaaggagtcgccgaggagcagcctgaggccccagagtctgagacgagccgccgccgcccccgccactgcggggaggagggggaggaggagcgggaggagggacgagctggtcgggagaagaggaaaaaaacttttgagacttttccgttgccgctgggagccggaggcgcggggacctcttggcgcgacgctgccccgcgaggaggcaggacttggggaccccagaccgcctccctttgccgccggggacgcttgctccctccctgccccctacacggcgtccctcaggcgcccccattccggaccagccctcgggagtcgccgacccggcctcccgcaaagacttttccccagacctcgggcgcaccccctgcacgccgccttcatccccggcctgtctcctgagcccccgcgcatcctagaccctttctcctccaggagacggatctctctccgacctgccacagatcccctattcaagaccacccaccttctggtaccagatcgcgcccatctaggttatttccgtgggatactgagacacccccggtccaagcctcccctccaccactgcgcccttctccctgaggagcctcagctttccctcgaggccctcctaccttttgccgggagacccccagcccctgcaggggcggggcctccccaccacaccagccctgttcgcgctctcggcagtgccggggggcgccgcctcccccatgccgccctccgggctgcggctgctgccgctgctgctaccgctgctgtggctactggtgctgacgcctggcccgccggccgcgggactatccacctgcaagactatcgacatggagctggtgaagcggaagcgcatcgaggccatccgcggccagatcctgtccaagctgcggctcgccagccccccgagccagggggaggtgccgcccggcccgctgcccgaggccgtgctcgccctgtacaacagcacccgcgaccgggtggccggggagagtgcagaaccggagcccgagcctgaggccgactactacgccaaggaggtcacccgcgtgctaatggtggaaacccacaacgaaatctatgacaagttcaagcagagtacacacagcatatatatgttcttcaacacatcagagctccgagaagcggtacctgaacccgtgttgctctcccgggcagagctgcgtctgctgaggaggctcaagttaaaagtggagcagcacgtggagctgtaccagaaatacagcaacaattcctggcgatacctcagcaaccggctgctggcacccagcgactcgccagagtggttatcttttgatgtcaccggagttgtgcggcagtggttgagccgtggaggggaaattgagggctttcgccttagcgcccactgctcctgtgacagcagggataacacactgcaagtggacatcaacgggttcactaccggccgccgaggtgacctggccaccattcatggcatgaaccggcctttcctgcttctcatggccaccccgctggagagggcccagcatctgcaaagctcccggcaccgccgagccctggacaccaactattgcttcagctccacggagaagaactgctgcgtgcggcagctgtacattgacttccgcaaggacctcggctggaagtggatccacgagcccaagggctaccatgccaacttctgcctcgggccctgcccctacatttggagcctggacacgcagtacagcaaggtcctggccctgtacaaccagcataacccgggcgcctcggcggcgccgtgctgcgtgccgcaggcgctggagccgctgcccatcgtgtactacgtgggccgcaagcccaaggtggagcagctgtccaacatgatcgtgcgctcctgcaagtgcagctgaggtcccgccccgccccgccccgccccggcaggcccggccccaccccgccccgcccccgctgccttgcccatgggggctgtatttaaggacaccgtgccccaagcccacctggggccccattaaagatggagagaggactgcggatctctgtgtcattgggcgcctgcctggggtctccatccctgacgttcccccactcccactccctctctctccctctctgcctcctcctgcctgtctgcactattcctttgcccggcatcaaggcacaggggaccagtggggaacactactgtagttagatctatttattgagcaccttgggcactgttgaagtgccttacattaatgaactcattcagtcaccatagcaacactctgagatggcagggactctgataacacccattttaaaggttgaggaaacaagcccagagaggttaagggaggagttcctgcccaccaggaacctgctttagtgggggatagtgaagaagacaataaaagatagtagttcaggccaggcggggtgctcacgcctgtaatcctagcacttttgggaggcagagatgggaggatacttgaatccaggcatttgagaccagcctgggtaacatagtgagaccctatctctacaaaacacttttaaaaaatgtacacctgtggtcccagctactctggaggctaaggtgggaggatcacttgatcctgggaggtcaaggctgcag

SEQ ID NO: 17 - DNA, 5054 bp, Homo sapiens
atgggagacgtaaaagcgttgctgtttgtcgttgctgcccgggccagacgtttaggaggagccgctgcatccgagtccctggctgtctccgaagccttctgcagggtccgaagctgccagcccaaaaagtgtgcaggcccccagcggtgcctgaacccagtgcctgcagtgcccagtcccagccccagcgtgaggaagagacaggtgtccctcaactggcagccactgacgctccaggaggccagagctctactgaagcggcggcggccccgggggccagggggccggggactactgagaaggaggcccccacagcgtgcccccgctggcaaggccccggtcctgtgtcccttgatctgtcacaatggcggtgtgtgcgtgaagcctgaccgctgcttctgtcccccggacttcgctggcaagttctgccagttgcactcctcgggcgcccggcccccggccccggctgtaccaggcctcacccgctccgtgtacactatgccactggccaaccaccgcgacgacgagcacggcgtggcatctatggtgagcgtccacgtggagcacccgcaggaggcgtcggtggtggtgcaccaggtggagcgtgtgtctggcccttgggaggaggcggacgctgaggcggtggcgcgggcggaagcggcggcgcgggcggaggcggcagcgccctacacggtgttggcacagagcgcgccgcgggaggacggctactcagatgcctcgggcttcggttactgctttcgggagctgcgcggaggcgaatgcgcgtccccgctgcccgggctccggacgcaggaggtctgctgccgaggggccggcttggcctggggcgttcacgactgtcagctgtgctccgagcgcctggggaactccgaaagagtgagcgccccagatggaccttgtccaaccggctttgaaagagttaatgggtcctgcgaagatgtggatgagtgcgcgactggcgggcgctgccagcacggcgagtgtgcaaacacgcgcggcgggtacacgtgtgtgtgccccgacggctttctgctcgactcgtcccgcagcagctgcatctcccaacacgtgatctcagaggccaaagggccctgcttccgcgtgctccgcgacggcggctgttcgctgcccattctgcggaacatcactaaacagatctgctgctgcagccgcgtaggcaaggcctggggccggggctgccagctctgcccacccttcggctcagagggtttccgggagatctgcccggctggtcctggttaccactactcggcctccgacctccgctacaacaccagacccctgggccaggagccaccccgagtgtcactcagccagcctcgtaccctgccagccacctctcggccatctgcaggctttctgcccacccatcgcctggagccccggcctgaaccccggcccgatccccggcccggccctgagcttcccttgcccagcatccctgcctggactggtcctgagattcctgaatcaggtccctcctccggcatgtgtcagcgcaacccccaggtctgcggcccaggacgctgcatttcccggcccagcggctacacctgcgcttgcgactctggcttccggctcagcccccagggcacccgatgcattgatgtggacgaatgtcgccgcgtgcccccgccctgtgctcccgggcgctgcgagaactcaccaggcagcttccgctgcgtgtgcggcccgggcttccgagccggcccacgggctgcggaatgcctggatgtggacgagtgccaccgcgtgccgccgccgtgtgacctcgggcgctgcgagaacacgccaggcagcttcctgtgcgtgtgccccgccgggtaccaggctgcaccgcacggagccagctgccaggatgtggatgaatgcacccagagcccaggcctgtgtggccgagggggctgcaagaacctgcctggctctttccgctgtgtttgcccggctggcttccggggctcggcgtgtgaagaggatgtggatgagtgtgcccaggaaccgccgccctgtgggcccggccgctgtgacaacacggcaggctcctttcactgtgcctgccctgctggcttccgctcccgagggcccggggccccctgccaagatgtggatgagtgtgcccgaagccccccaccctgcacctacgggcggtgtgagaacacagaaggcagcttccagtgtgtctgccccatgggcttccaacccaacactgctggctccgagtgcgaagatgtggatgaatgtgaaaaccacctcgcatgccctgggcaggaatgtgtgaactcgcccggctccttccagtgcaggacctgtccttctggccaccacctgcaccgtggcagatgcactgatgtggacgaatgcagttcgggtgcccctccctgtggtccccacggccactgcactaacaccgaaggctccttccgctgcagctgcgcgccaggctaccgggcgccgtcgggtcggcccgggccctgcgcagacgtgaacgagtgcctggagggcgatttctgcttccctcacggcgagtgcctcaacactgacggctcctttgcctgtacttgtgcccctggctaccgacccggaccccgcggagcctcttgcctcgacgttgacgagtgcagcgaggaggacctttgccagagcggcatctgtaccaacaccgacggctccttcgagtgcatctgtcctccgggacaccgcgctggtccggacctcgcctcctgtctcgacgtggacgaatgtcgcgagcgaggtccagccctgtgcgggtcgcagcgttgtgagaactctcccggctcctaccgctgtgtccgggactgcgatcctgggtaccacgcgggccccgagggcacctgtgacgatgtggatgagtgccaagaatatggtcccgagatttgtggagcccagcgttgtgagaacacccctggctcctaccgctgtacaccagcctgtgaccctggctatcagcccacgccagggggcggatgccaggatgtggacgaatgccggaaccggtccttctgcggtgcccacgccgtgtgccagaacctgcccggctccttccagtgcctctgtgaccagggttacgagggggcacgggatgggcgtcactgcgtggatgtgaacgagtgtgaaacactacagggtgtatgtggagctgccctgtgtgaaaatgtcgaaggctccttcctctgtgtctgccccaacagcccggaagagtttgaccccatgactggacgctgtgttcccccacgaacttctgttggcatgtccccaggctcgcagccccaggcacctgttagccccgttctgcccgccaggccacctccgccacccctgtcccgccgacccagaaaacctaggaagggccctgtggggagtgggtgccgggagtgctattttgacacagcggccccggatgcatgtgacaacatcctggctcggaatgtgacatggcaggagtgctgctgtactgtgggtgagggctggggcagcggctgccgcatccagcagtgcccgggcaccgagacagctgagtaccagtcattgtgccctcacggccggggctacctggcgcccagtggagacctgagcctccggagagacgtggacgaatgtcagctcttccgagaccaggtgtgcaagagtggcgtgtgtgtgaacacggccccgggctactcatgctattgcagcaacggctactactaccacacacagcggctggagtgcatcgataatgacgagtgcgccgatgaggaaccggcctgtgagggcggccgctgtgtcaacactgtgggctcttatcactgtacctgcgagcccccactggtgctggatggctcgcagcgccgctgcgtctccaacgagagccagagcctcgatgacaatctgggagtgtgctggcaggaagtgggggctgacctcgtgtgcagccaccctcggctggaccgtcaggccacctacacagagtgctgctgcctgtatggagaggcctggggcatggactgcgccctctgccctgcgcaggactcagatgacttcgaggccctgtgcaatgtgctacgcccccccgcatatagccccccgcgaccaggtggctttggactcccctacgagtacggcccagacttaggtccaccttaccagggcctcccatatgggcctgagttgtacccaccacctgcgctaccctacgacccctacccaccgccacctgggcccttcgcccgccgggaggctccttatggggcaccccgcttcgacatgccagactttgaggacgatggtggcccctatggcgaatctgaggctcctgcgccacctggcccgggcacccgctggccctatcggtcccgggacacccgccgctccttcccagagcccgaggagcctcctgaaggtggaagctatgctggttccctggctgagccctacgaggagctggaggcggaggagtgcgggatcctggacggctgcaccaacgaccgctgcgtgcgcgtccccgaaggcttcacctgccgttgcttcgacggctaccgcctggacatgacccgcatggcctgcgttgacatcaacgagtgtgatgaggccgaggctgcctccccgctgtgcgtcaacgcgcgttgcctcaacacggatggctccttccgctgcatctgccgcccgggattcgcacccacgcaccagccgcaccactgtgcgcccgcacggccccgggcctgagccctggcacccgctggccacccacccgcgcccgccactcggggcccctgccgcgcatcctgcagcccgcttatgcgtatgtgcacggggccgcccgcctggacctggagaagggacctacggacgcctggaagctgcgacgccctgcactgctcccgcctccaccagcgcctcccactgatgtcgtggtcccgggcctggcccaggggcccctttacatgccctctcccttttataaaattttccattaaaaaccacctattttctaaaaaaaaaaaaaaaaaaaaaaa

SEQ ID NO: 18 - DNA, 4743 bp, Homo sapiens
cgggcggcgtgcggctgctctgggtgtcgctattggtgctgctggcgcagctagggccgcagcctggactgggccggctcggagagcgtctccgcgtgcgcttcaccccggtcgtgtgcggcctgcgctgcgtccatgggccgaccggctcccgctgtaccccgacctgcgcgccccgcaacgccaccagcgtggacagcggcgctcccggcggggcggccccggggggacccggcttccgcgccttcctgtgtcccttgatctgtcacaatggcggtgtgtgcgtgaagcctgaccgctgcctctgtcccccggacttcgctggcaagttctgccagttgcactcctcgggcgcccggcccccggccccggctgtaccaggcctcacccgctccgtgtacactatgccactggccaaccaccgcgacgacgagcacggcgtggcatctatggtgagcgtccacgtggagcacccgcaggaggcgtcggtggtggtgcaccaggtggagcgtgtgtctggcccttgggaggaggcggacgctgaggcggtggcgcgggcggaagcggcggcgcgggcggaggcggcagcgccctacacggtgttggcacagagcgcgccgcgggaggacggctactcagatgcctcgggcttcggttactgctttcgggagctgcgcggaggcgaatgcgcgtccccgctgcccgggctccggacgcaggaggtctgctgccgaggggccggcttggcctggggcgttcacgactgtcagctgtgctccgagcgcctggggaactccgaaagagtgagcgccccagatggaccttgtccaaccggctttgaaagagttaatgggtcctgcgaagatgtggatgagtgcgcgactggcgggcgctgccagcacggcgagtgtgcaaacacgcgcggcgggtacacgtgtgtgtgccccgacggctttctgctcgactcgtcccgcagcagctgcatctcccaacacgtgatctcagaggccaaagggccctgcttccgcgtgctccgcgacggcggctgttcgctgcccattctgcggaacatcactaaacagatctgctgctgcagccgcgtaggcaaggcctggggccggggctgccagctctgcccacccttcggctcagagggtttccgggagatctgcccggctggtcctggttaccactactcggcctccgacctccgctacaacaccagacccctgggccaggagccaccccgagtgtcactcagccagcctcgtaccctgccagccacctctcggccatctgcaggctttctgcccacccatcgcctggagccccggcctgaaccccggcccgatccccggcccggccctgagcttcccttgcccagcatccctgcctggactggtcctgagattcctgaatcaggtccctcctccggcatgtgtcagcgcaacccccaggtctgcggcccaggacgctgcatttcccggcccagcggctacacctgcgcttgcgactctggcttccggctcagcccccagggcacccgatgcattgatgtggacgaatgtcgccgcgtgcccccgccctgtgctcccgggcgctgcgagaactcaccaggcagcttccgctgcgtgtgcggcccgggcttccgagccggcccacgggctgcggaatgcctggatgtggacgagtgccaccgcgtgccgccgccgtgtgacctcgggcgctgcgagaacacgccaggcagcttcctgtgcgtgtgccccgccgggtaccaggctgcaccgcacggagccagctgccaggatgtggatgaatgcacccagagcccaggcctgtgtggccgaggggcctgcaagaacctgcctggctctttccgctgtgtttgcccggctggcttccggggctcggcgtgtgaagaggatgtggatgagtgtgcccaggagccgccgccctgtgggcccggccgctgtgacaacacggcaggctcctttcactgtgcctgccctgctggcttccgctcccgagggcccggggccccctgccaagatgtggatgagtgtgcccgaagccccccaccctgcacctacggccggtgtgagaacacagaaggcagcttccagtgtgtctgccccatgggcttccaacccaacactgctggctccgagtgcgaggatgtggatgagtgtgagaaccacctcgcatgccctgggcaggagtgtgtgaactcgcccggctccttccagtgcaggacctgtccttctggccaccacctgcaccgtggcagatgcactgatgtggacgaatgcagttcgggtgcccctccctgtggtccccacggccactgcactaacaccgaaggctccttccgctgcagctgcgcgccaggctaccgggcgccgtcgggtcggcccgggccctgcgcagacgtgaacgagtgcctggagggcgatttctgcttccctcacggcgagtgcctcaacactgacggctcctttgcctgtacttgtgcccctggctaccgacccggaccccgcggagcctcttgcctcgacgttgacgagtgcagcgaggaggacctttgccagagcggcatctgtaccaacaccgacggctccttcgagtgcatctgtcctccgggacaccgcgctggcccggacctcgcctcctgcctcggacgtggacgaatgtcgcgagcgaggcccagccctgtgcgggtcgcagcgctgtgagaactctcccggctcctaccgctgtgtccgggactgcgatcctgggtaccacgcgggccccgagggcacctgtgacgatgtggatgagtgccaagaatatggtcccgagatttgtggagcccagcgttgtgagaacacccctggctcctaccgctgcacaccagcctgtgaccctggctatcagcccacgccagggggcggatgccaggatgtggacgaatgccggaaccggtccttctgcggtgcccacgccgtgtgccagaacctgcccggctccttccagtgcctctgtgaccaggttacgagggggcacgggatgggcgtcactgcgtggatgtgaacgagtgtgaaacactacagggtgtatgtggagctgccctgtgtgaaaatgtcgaaggctccttcctctgtgtctgccccaacagcccggaagagtttgaccccatgactggacgctgtgttcccccacgaacttctgctggcacgttcccaggctcgcagccccaggcacctgctagccccgttctgcccgccaggccacctccgccacccctgccccgccgacccagcacacctaggcagggccctgtggggagtgggcgccgggagtgctactttgacacagcggccccggatgcatgtgacaacatcctggctcggaatgtgacatggcaggagtgctgctgtactgtgggtgagggctggggcagcggctgccgcatccagcagtgcccgggcaccgagacagctgagtaccagtcattgtgccctcacggccggggctacctggcgcccagtggagacctgagcctccggagagacgtggacgaatgtcagctcttccgagaccaggtgtgcaagagtggcgtgtgtgtgaacacggccccgggctactcatgctattgcagcaacggctactactaccacacacagcggctggagtgcatcgacaatgacgagtgcgccgatgaggaaccggcctgtgagggcggccgctgtgtcaacactgtgggctcttatcactgtacctgcgagcccccactggtgctggatggctcgcagcgccgctgcgtctccaacgagagccagagcctcgatgacaatctgggagtgtgctggcaggaagtgggggctgacctcgtgtgcagccaccctcggctggaccgtcaggccacctacacagagtgctgctgcctgtatggagaggcctggggcatggactgcgccctctgccctgcgcaggactcagatgacttcgaggccctgtgcaatgtgctacgcccccccgcatatagccccccgcgaccaggtggctttggactcccctacgagtacggcccagacttaggtccaccttaccagggcctcccatatgggcctgagttgtacccaccacctgcgctaccctacgacccctacccaccgccacctgggcccttcgcccgccgggaggctccttatggggcaccccgcttcgacatgccagactttgaggacgatggtggcccctatggcgaatctgaggctcctgcgccacctggcccgggcacccgctggccctatcggtcccgggacacccgccgctccttcccagagcccgaggagcctcctgaaggtggaagctatgctggttccctggctgagccctacgaggagctggaggcggaggagtgcgggatcctggacggctgcaccaacggccgctgcgtgcgcgtccccgaaggcttcacctgccgttgcttcgacggctaccgcctggacatgacccgcatggcctgcgttgacatcaacgagtgtgatgaggccgaggctgcctccccgctgtgcgtcaacgcgcgttgcctcaacacggatggctccttccgctgcatctgccgcccgggattcgcacccacgcaccagccgcaccactgtgcgcccgcacggccccgggcctgagccctggcacccgctggccgcccacccgcgcccgccactcggggcccctgccgcgcatcctgcagcccgctta

SEQ ID NO: 19 - DNA, 1895 bp, Homo sapiens
gctttccagccccaaccatgcataaaaggggttcgcggatctcggagagccacagagcccgggccgcaggcacctcctcgccagctcttccgctcctctcacagccgccagacccgcctgctgagccccatggcccgcgctgctctctccgccgcccccagcaatccccggctcctgcgagtggcactgctgctcctgctcctggtagccgctggccggcgcgcagcaggtgggtaccggcgccctggggtccccgggccggacgcggctggggtaggcacccagcgccgacagcctcgctcagtcagtgagtctcttcttccctaggagcgtccgtggccactgaactgcgctgccagtgcttgcagaccctgcagggaattcaccccaagaacatccaaagtgtgaacgtgaagtcccccggaccccactgcgcccaaaccgaagtcatgtaagtcccgccccgcgctgcctctgccaccgccggggtcccagaccctcctgctgccccaaccctgtccccagcccgacctcctgcctcacgagattcccttccctctgcagagccacactcaagaatgggcggaaagcttgcctcaatcctgcatcccccatagttaagaaaatcatcgaaaagatgctgaacaggtgagttatggtttccatgtacacaggcgactggagccgttggtcagaaatactggcatgtgccccctaaaaataaaatcaggaaaacccaggggttagttgaaggactagaaattgggattattgttttcacaattaaggtttcctttacgataattactgctctggtgccagaggatattcccaatgcctggcgtccccaccctggttcttccttcgttccaatgaatgtaggtaaaactgccttcatttgaggcccagtaggacaaacagcaacaggttctggctgtttttaatccaatagtacagtggagaccaccgccccaccccacccccattcctaaaagagcatcccaagcttagaggtccctgccacacagcacagctgtcataggcagtagccacttggttgccaggctggggaaactgcattcggagaactctagaggctggaggagcagggcaggagaagagtgttgtgcaatcagctttcccgagcacctactcagggcacccattttctcattgcagtgacaaatccaactgaccagaagggaggaggaagctcactggtggctgttcctgaaggaggccctgcccttataggaacagaagaggaaagagagacacagctgcagaggccacctggattgtgcctaatgtgtttgagcatcgcttaggagaagtcttctatttatttatttattcattagttttgaagattctatgttaatattttaggtgtaaaataattaagggtatgattaactctacctgcacactgtcctattatattcattctttttgaaatgtcaaccccaagttagttcaatctggattcatatttaatttgaaggtagaatgttttcaaatgttctccagtcattatgttaatatttctgaggagcctgcaacatgccagccactgtgatagaggctggcggatccaagcaaatggccaatgagatcattgtgaaggcaggggaatgtatgtgcacatctgttttgtaactgtttagatgaatgtcagttgttatttattgaaatgatttcacagtgtgtggtcaacatttctcatgttgaaactttaagaactaaaatgttctaaatatcccttggacattttatgtctttcttgtaaggcatactgccttgtttaatggtagttttacagtgtttctggcttagaacaaaggggcttaattattgatgttttcatagagaatataaaaataaagcacttatag

SEQ ID NO: 20 - DNA, 1041 bp, Homo sapiens
cccgcctgctgagccccatggcccgcgctgctctctccgccgcccccagcaatccccggctcctgcgagtggcactgctgctcctgctcctggtagccgctggccggcgcgcagcaggagcgtccgtggccactgaactgcgctgccagtgcttgcagaccctgcagggaattcaccccaagaacatccaaagtgtgaacgtgaagtcccccggaccccactgcgcccaaaccgaagtcatagccacactcaagaatgggcggaaagcttgcctcaatcctgcatcccccatagttaagaaaatcatcgaaaagatgctgaacagtgacaaatccaactgaccagaagggaggaggaagctcactggtggctgttcctgaaggaggccctgcccttataggaacagaagaggaaagagagacacagctgcagaggccacctggattgtgcctaatgtgtttgagcatcgcttaggagaagtcttctatttatttatttattcattagttttgaagattctatgttaatattttaggtgtaaaataattaagggtatgattaactctacctgcacactgtcctattatattcattctttttgaaatgtcaaccccaagttagttcaatctggattcatatttaatttgaaggtagaatgttttcaaatgttctccagtcattatgttaatatttctgaggagcctgcaacatgccagccactgtgatagaggctggcggatccaagcaaatggccaatgagatcattgtgaaggcaggggaatgtatgtgcacatctgttttgtaactgtttagatgaatgtcagttgttatttattgaaatgatttcacagtgtgtggtcaacatttctcatgttgaaactttaagaactaaaatgttctaaatatcccttggacattttatgtctttcttgtaaggcatactgccttgtttaatggtagttttacagtgtttctggcttagaacaaaggggcttaattattgatgttttcatagagaatataaaaataaagcacttatag

SEQ ID NO: 21 - DNA, 1103 bp, Homo sapiens
cacagagcccgggccgcaggcacctcctcgccagctcttccgctcctctcacagccgccagacccgcctgctgagccccatggcccgcgctgctctctccgccgcccccagcaatccccggctcctgcgagtggcactgctgctcctgctcctggtagccgctggccggcgcgcagcaggagcgtccgtggccactgaactgcgctgccagtgcttgcagaccctgcagggaattcaccccaagaacatccaaagtgtgaacgtgaagtcccccggaccccactgcgcccaaaccgaagtcatagccacactcaagaatgggcggaaagcttgcctcaatcctgcatcccccatagttaagaaaatcatcgaaaagatgctgaacagtgacaaatccaactgaccagaagggaggaggaagctcactggtggctgttcctgaaggaggccctgcccttataggaacagaagaggaaagagagacacagctgcagaggccacctggattgtgcctaatgtgtttgagcatcgcttaggagaagtcttctatttatttatttattcattagttttgaagattctatgttaatattttaggtgtaaaataattaagggtatgattaactctacctgcacactgtcctattatattcattctttttgaaatgtcaaccccaagttagttcaatctggattcatatttaatttgaaggtagaatgttttcaaatgttctccagtcattatgttaatatttctgaggagcctgcaacatgccagccactgtgatagaggctggcggatccaagcaaatggccaatgagatcattgtgaaggcaggggaatgtatgtgcacatctgttttgtaactgtttagatgaatgtcagttgttatttattgaaatgatttcacagtgtgtggtcaacatttctcatgttgaaactttaagaactaaaatgttctaaatatcccttggacattttatgtctttcttgtaaggcatactgccttgtttaatggtagttttacagtgtttctggcttagaacaaaggggcttaattattgatgttttcatagagaatataaaaataaagcacttatag

SEQ ID NO: 22 - DNA, 2249 bp, Homo sapiens
cccggatcggggaagtgaaagtgcctcggaggaggagggccggtccggcagtgcagccgcctcacaggtcggcggacgggccaggcgggcggcctcctgaaccgaaccgaatcggctcctcgggccgtcgtcctcccgcccctcctcgcccgccgccggagttttctttcggtttcttccaagattcctggccttccctcgacggagccgggcccagtgcgggggcgcagggcgcgggagctccacctcctcggctttccctgcgtccagaggctggcatggcgcgggccgagtactgagcgcacggtcggggcacagcagggccggtgggtgcagctggctcgcgcctcctctccggccgccgtctcctccggtccccggcgaaagccattgagacaccagctggacgtcacgcgccggagcatgtctgggagtcagagcgaggtggctccatccccgcagagtccgcggagccccgagatgggacgggacttgcggcccgggtcccgcgtgctcctgctcctgcttctgctcctgctggtgtacctgactcagccaggcaatggcaacgagggcagcgtcactggaagttgttattgtggtaaaagaatttcttccgactccccgccatcggttcagttcatgaatcgtctccggaaacacctgagagcttaccatcggtgtctatactacacgaggttccagctcctttcctggagcgtgtgtggaggcaacaaggacccatgggttcaggaattgatgagctgtcttgatctcaaagaatgtggacatgcttactcggggattgtggcccaccagaagcatttacttcctaccagccccccaacttctcaggcctcagagggggcatcttcagatatccacacccctgcccagatgctcctgtccaccttgcagtccactcagcgccccaccctcccagtaggatcactgtcctcggacaaagagctcactcgtcccaatgaaaccaccattcacactgcgggccacagtctggcagttgggcctgaggctggggagaaccagaagcagccggaaaaaaatgctggtcccacagccaggacatcagccacagtgccggtcctgtgcctcctggccatcatcttcatcctcaccgcagccctttcctatgtgctgtgcaagaggaggagggggcagtcaccgcagtcctctccagatctgccggttcattatatacctgtggcacctgactctaatacctgagccaagaatggaagcttgtgaggagacggactctatgttgcccaggctgttatggaactcctgagtcaagtgatcctcccaccttggcctctgaaggtgcgaggattataggcgtcacctaccacatccagcctacacgtatttgttaatatctaacataggactaaccagccactgccctctcttaggcccctcatttaaaaacggttatactataaaatctgcttttcacactgggtgataataacttggacaaattctatgtgtattttgttttgttttgctttgctttgttttgagacggagtctcgctctgtcatccaggctggagtgcagtggcatgatctcggctcactgcaacccccatctcccaggttcaagcgattctcctgcctcctcctaagtagctgggactacaggtgctcaccaccacacccggctaattttttgtatttttagtagagacggggtttcaccatgttgaccaggctggtctcgaactcctgacctggtgatctgcccacccaggcctcccaaagtgctgggattaaaggtgtgagccaccatgcctggccctatgtgtgttttttaactactaaaaattatttttgtaatgattgagtcttctttatggaaacaactggcctcagcccttgcgcccttactgtgattcctggcttcattttttgctgatggttccccctcgtcccaaatctctctcccagtacaccagttgttcctcccccacctcagccctctcctgcatcctcctgtacccgcaacgaaggcctgggctttcccaccctccctccttagcaggtgccgtgctgggacaccatacgggttggtttcacctcctcagtcccttgcctaccccagtgagagtctgatcttgtttttattgttattgcttttattattattgcttttattatcattaaaactctagttcttgttttgtctctcaaaaaaaaaaaaaaaaaaaaaaaaaaaaaaaaaaaaac

SEQ ID NO: 23 - DNA, 1547 bp, Homo sapiens
ggcacgagccagtctccgcgcctccacccagctcaggaacccgcgaaccctctcttgaccactatgagcctcccgtccagccgcgcggcccgtgtcccgggtccttcgggctccttgtgcgcgctgctcgcgctgctgctcctgctgacgccgccggggcccctcgccagcgctggtcctgtctctgctgtgctgacagagctgcgttgcacttgtttacgcgttacgctgagagtaaaccccaaaacgattggtaaactgcaggtgttccccgcaggcccgcagtgctccaaggtggaagtggtagcctccctgaagaacgggaagcaagtttgtctggacccggaagccccttttctaaagaaagtcatccagaaaattttggacagtggaaacaagaaaaactgagtaacaaaaaagaccatgcatcataaaattgcccagtcttcagcggagcagttttctggagatccctggacccagtaagaataagaaggaagggttggtttttttccattttctacatggattccctactttgaagagtgtgggggaaagcctacgcttctccctgaagtttacagctcagctaatgaagtactaatatagtatttccactatttactgttattttacctgataagttattgaaccctttggcaattgaccatattgtgagcaaagaatcactggttattagtctttcaatgaatattgaattgaagataactattgtatttctatcatacattccttaaagtcttaccgaaaaggctgtggatttcgtatggaaataatgttttattagtgtgctgttgagggaggtatcctgttgttcttactcactcttctcataaaataggaaatattttagttctgttttcttggggaatatgttactctttaccctaggatgctatttaagttgtactgtattagaacactgggtgtgtcataccgttatctgtgcagaatatatttccttattcagaatttctaaaaatttaagttctgtaagggctaatatattctcttcctatggttttagatgtttgatgtcttcttagtatggcataatgtcatgatttactcattaaactttgattttgtatgctattttttcactataggatgactataattctggtcactaaatatacactttagatagatgaagaagcccaaaaacagataaattcctgattgctaatttacatagaaatgtattctcttggttttttaaataaaagcaaaattaacaatgatctgtgctctgcaaagttttgaaaatatatttgaacaatttgaatataaattcatcatttagtcctcaaaatatatacagcattgctaagattttcagatatctattgtggatcttttaaaggttttgaccattttgttatgaggaattatacatgtatcacattcactatattaaaattgcacttttattttttcctgtgtgtcatgttggtttttggtacttgtattgtcatttggagaaacaataaaagatttctaaaccaaaaaaaaaaaaaaaaaaa

SEQ ID NO: 24 - DNA, 852 bp, Homo sapiens
cttgcagctgcccacctcaccctcagctctggcctcttactcaccctctaccacagacatggctcagtcactggctctgagcctccttatcctggttctggcctttggcatccccaggacccaaggcagtgatggaggggctcaggactgttgcctcaagtacagccaaaggaagattcccgccaaggttgtccgcagctaccggaagcaggaaccaagcttaggctgctccatcccagctatcctgttcttgccccgcaagcgctctcaggcagagctatgtgcagacccaaaggagctctgggtgcagcagctgatgcagcatctggacaagacaccatccccacagaaaccagcccagggctgcaggaaggacaggggggcctccaagactggcaagaaaggaaagggctccaaaggctgcaagaggactgagcggtcacagacccctaaagggccatagcccagtgagcagcctggagccctggagaccccaccagcctcaccaacgcttgaagcctgaacccaagatgcaagaaggaggctatgctcaggggccctggagcagccaccccatgctggccttgccacactctttctcctgctttaaccaccccatctgcattcccagctctaccctgcatggctgagctgcccacagcaggccaggtccagagagaccgaggagggagagtctcccagggagcatgagaggaggcagcaggactgtccccttgaaggagaatcatcaggaccctggacctgatacggctccccagtacaccccacctcttccttgtaaatatgatttatacctaactgaataaaaagctgttctgtcttcccacccgc

SEQ ID NO: 25 - DNA, 687 bp, Homo sapiens
cattcccagcctcacatcactcacaccttgcatttcacccctgcatcccagtcgccctgcagcctcacacagatcctgcacacacccagacagctggcgctcacacattcaccgttggcctgcctctgttcaccctccatggccctgctactggccctcagcctgctggttctctggacttccccagccccaactctgagtggcaccaatgatgctgaagactgctgcctgtctgtgacccagaaacccatccctgggtacatcgtgaggaacttccactaccttctcatcaaggatggctgcagggtgcctgctgtagtgttcaccacactgaggggccgccagctctgtgcacccccagaccagccctgggtagaacgcatcatccagagactgcagaggacctcagccaagatgaagcgccgcagcagttaacctatgaccgtgcagagggagcccggagtccgagtcaagcattgtgaattattacctaacctggggaaccgaggaccagaaggaaggaccaggcttccagctcctctgcaccagacctgaccagccaggacagggcctggggtgtgtgtgagtgtgagtgtgagcgagagggtgagtgtggtcagagtaaagctgctccacccccagattgcaatgctaccaataaagccgcctggtgtttacaactaattg

SEQ ID NO: 26 - DNA, 850 bp, Homo sapiens
cttgcagctgcccacctcaccctcagctctggcctcttactcaccctctaccacagacatggctcagtcactggctctgagcctccttatcctggttctggcctttggcatccccaggacccaaggcagtgatggaggggctcaggactgttgcctcaagtacagccaaaggaagattcccgccaaggttgtccgcagctaccggaagcaggaaccaagcttaggctgctccatcccagctatcctgttcttgccccgcaagcgctctcaggcagagctatgtgcagacccaaaggagctctgggtgcagcagctgatgcagcatctggacaagacaccatccccacagaaaccagcccagggctgcaggaaggacaggggggcctccaagactggcaagaaaggaaagggctccaaaggctgcaagaggactgagcggtcacagacccctaaagggccatagcccagtgagcagcctggagccctggagaccccaccagcctcaccagcgcttgaagcctgaacccaagatgcaagaaggaggctatgctcaggggccctggagcagccaccccatgctggccttgccacactctttctcctgctttaaccaccccatctgcattcccagctctaccctgcatggctgagctgcccacagcaggccaggtccagagagaccgaggagggagagtctcccagggagcatgagaggaggcagcaggactgtccccttgaaggagaatcatcaggaccctggacctgatacggctccccagtacaccccacctcttccttgtaaatatgatttatacctaactgaataaaaagctgttctgtcttcccaccc

SEQ ID NO: 27 - DNA, 878 bp, Homo sapiens
atcccagcccacgcacagacccccaacttgcagctgcccacctcaccctcagctctggcctcttactcaccctctaccacagacatggctcagtcactggctctgagcctccttatcctggttctggcctttggcatccccaggacccaaggcagtgatggaggggctcaggactgttgcctcaagtacagccaaaggaagattcccgccaaggttgtccgcagctaccggaagcaggaaccaagcttaggctgctccatcccagctatcctgttcttgccccgcaagcgctctcaggcagagctatgtgcagacccaaaggagctctgggtgcagcagctgatgcagcatctggacaagacaccatccccacagaaaccagcccagggctgcaggaaggacaggggggcctccaagactggcaagaaaggaaagggctccaaaggctgcaagaggactgagcggtcacagacccctaaagggccatagcccagtgagcagcctggagccctggagaccccaccagcctcaccagcgcttgaagcctgaacccaagatgcaagaaggaggctatgctcaggggccctggagcagccaccccatgctggccttgccacactctttctcctgctttaaccaccccatctgcattcccagctctaccctgcatggctgagctgcccacagcaggccaggtccagagagaccgaggagggagagtctcccagggagcatgagaggaggcagcaggactgtccccttgaaggagaatcatcaggaccctggacctgatacggctccccagtacaccccacctcttccttgtaaatatgatttatacctaactgaataaaaagctgttctgtcttcccacccaa

SEQ ID NO: 28 - DNA, 5041 bp, Homo sapiens
gcggccgcgactattcggtacctgaaaacaacgatggcatggaaaacacttcccatttacctgttgttgctgctgtctgttttcgtgattcagcaagtttcatctcaagatttatcaagctgtgcagggagatgtggggaagggtattctagagatgccacctgcaactgtgattataactgtcaacactacatggagtgctgccctgatttcaagagagtctgcactgcggagctttcctgtaaaggccgctgctttgagtccttcgagagagggagggagtgtgactgcgacgcccaatgtaagaagtatgacaagtgctgtcccgattatgagagtttctgtgcagaagtgcataatcccacatcaccaccatcttcaaagaaagcacctccaccttcaggagcatctcaaaccatcaaatcaacaaccaaacgttcacccaaaccaccaaacaagaagaagactaagaaagttatagaatcagaggaaataacagaagaacattctgtttctgaaaatcaagagtcctcctcctcctcctcctcttcctcttcttcttcaacaatttggaaaatcaagtcttccaaaaattcagctgctaatagagaattacagaagaaactcaaagtaaaagataacaagaagaacagaactaaaaagaaacctacccccaaaccaccagttgtagatgaagctggaagtggattggacaatggtgacttcaaggtcacaactcctgacacgtctaccacccaacacaataaagtcagcacatctcccaagatcacaacagcaaaaccaataaatcccagacccagtcttccacctaattctgatacatctaaagagacgtctttgacagtgaataaagagacaacagttgaaactaaagaaactactacaacaaataaacagacttcaactgatggaaaagagaagactacttccgctaaagagacacaaagtatagagaaaacatctgctaaagatttagcacccacatctaaagtgctggctaaacctacacccaaagctgaaactacaaccaaaggccctgctctcaccactcccaaggagcccacgcccaccactcccaaggagcctgcatctaccacacccaaagagcccacacctaccaccatcaagtctgcacccaccacccccaaggagcctgcacccaccaccaccaagtctgcacccaccactcccaaggagcctgcacccaccaccaccaaggagcctgcacccaccactcccaaggagcctgcacccaccaccaccaaggagcctgcacccaccaccaccaagtctgcacccaccactcccaaggagcctgcacccaccacccccaagaagcctgccccaactacccccaaggagcctgcacccaccactcccaaggagcctacacccaccactcccaaggagcctgcacccaccaccaaggagcctgcacccaccactcccaaagagcctgcacccactgcccccaagaagcctgccccaactacccccaaggagcctgcacccaccactcccaaggagcctgcacccaccaccaccaaggagccttcacccaccactcccaaggagcctgcacccaccaccaccaagtctgcacccaccactaccaaggagcctgcacccaccactaccaagtctgcacccaccactcccaaggagccttcacccaccaccaccaaggagcctgcacccaccactcccaaggagcctgcacccaccacccccaagaagcctgccccaactacccccaaggagcctgcacccaccactcccaaggaacctgcacccaccaccaccaagaagcctgcacccaccgctcccaaagagcctgccccaactacccccaaggagactgcacccaccacccccaagaagctcacgcccaccacccccgagaagctcgcacccaccacccctgagaagcccgcacccaccacccctgaggagctcgcacccaccacccctgaggagcccacacccaccacccctgaggagcctgctcccaccactcccaaggcagcggctcccaacacccctaaggagcctgctccaactacccctaaggagcctgctccaactacccctaaggagcctgctccaactacccctaaggagactgctccaactacccctaaagggactgctccaactaccctcaaggaacctgcacccactactcccaagaagcctgcccccaaggagcttgcacccaccaccaccaaggagcccacatccaccacctctgacaagcccgctccaactacccctaaggggactgctccaactacccctaaggagcctgctccaactacccctaaggagcctgctccaactacccctaaggggactgctccaactaccctcaaggaacctgcacccactactcccaagaagcctgcccccaaggagcttgcacccaccaccaccaaggggcccacatccaccacctctgacaagcctgctccaactacacctaaggagactgctccaactacccccaaggagcctgcacccactacccccaagaagcctgctccaactactcctgagacacctcctccaaccacttcagaggtctctactccaactaccaccaaggagcctaccactatccacaaaagccctgatgaatcaactcctgagctttctgcagaacccacaccaaaagctcttgaaaacagtcccaaggaacctggtgtacctacaactaagactcctgcagcgactaaacctgaaatgactacaacagctaaagacaagacaacagaaagagacttacgtactacacctgaaactacaactgctgcacctaagatgacaaaagagacagcaactacaacagaaaaaactaccgaatccaaaataacagctacaaccacacaagtaacatctaccacaactcaagataccacaccattcaaaattactactcttaaaacaactactcttgcacccaaagtaactacaacaaaaaagacaattactaccactgagattatgaacaaacctgaagaaacagctaaaccaaaagacagagctactaattctaaagcgacaactcctaaacctcaaaagccaaccaaagcacccaaaaaacccacttctaccaaaaagccaaaaacaatgcctagagtgagaaaaccaaagacgacaccaactccccgcaagatgacatcaacaatgccagaattgaaccctacctcaagaatagcagaagccatgctccaaaccaccaccagacctaaccaaactccaaactccaaactagttgaagtaaatccaaagagtgaagatgcaggtggtgctgaaggagaaacacctcatatgcttctcaggccccatgtgttcatgcctgaagttactcccgacatggattacttaccgagagtacccaatcaaggcattatcatcaatcccatgctttccgatgagaccaatatatgcaatggtaagccagtagatggactgactactttgcgcaatgggacattagttgcattccgaggtcattatttctggatgctaagtccattcagtccaccatctccagctcgcagaattactgaagtttggggtattccttcccccattgatactgtttttactaggtgcaactgtgaaggaaaaactttcttctttaaggattctcagtactggcgttttaccaatgatataaaagatgcagggtaccccaaaccaattttcaaaggatttggaggactaactggacaaatagtggcagcgctttcaacagctaaatataagaactggcctgaatctgtgtattttttcaagagaggtggcagcattcagcagtatatttataaacaggaacctgtacagaagtgccctggaagaaggcctgctctaaattatccagtgtatggagaaatgacacaggttaggagacgtcgctttgaacgtgctataggaccttctcaaacacacaccatcagaattcaatattcacctgccagactggcttatcaagacaaaggtgtccttcataatgaagttaaagtgagtatactgtggagaggacttccaaatgtggttacctcagctatatcactgcccaacatcagaaaacctgacggctatgattactatgccttttctaaagatcaatactataacattgatgtgcctagtagaacagcaagagcaattactactcgttctgggcagaccttatccaaagtctggtacaactgtccttagactgatgagcaaaggaggagtcaactaatgaagaaatgaataataaattttgacactgaaaaacattttattaataaagaatattgacatgagtataccagtttatatataaaaatgtttttaaacttgacaatcattacactaaaacagatttgataatcttattcacagttgttattgtttacagaccatttaattaatatttcctctgtttattcctcctctccctcccattgcatggctcacacctgtaaaagaaaaaagaatcaaattgaatatatcttttaagaattcaaaactagtgtattcacttaccctagttcattataaaaaatatctaggcattgtggatataaaactgttgggtattctacaacttcaatggaaattattacaagcagattaatccctctttttgtgacacaagtacaatctaaaagttatattggaaaacatggaaatattaaaattttacacttttactagctaaaacataatcacaaagctttatcgtgttgtataaaaaaattaacaatataatggcaataggtagagatacaacaaatgaatataacactataacacttcatattttccaaatcttaatttggatttaaggaagaaatcaataaatataaaatataagcacatatttattatatatctaaggtatacaaatctgtctacatgaagtttacagattggtaaatatcacctgctcaacatgtaattatttaataaaactttggaacattaaaaaaataaattggaggcttaaaaaaaaaaaaaaaaa

SEQ ID NO: 29 - DNA, 2749 bp, Homo sapiens
gagggctggccagtgaggctcggcccggggaaagtgaaagtttgcctgggtcctctcggcgccagagccgctctccgcatcccaggacagcggtgcggccctcggccggggcgcccactccgcagcagccagcgagcgagcgagcgagcgagggcggccgacgcgcccggccgggacccagctgcccgtatgaccgcgccgggcgccgccgggcgctgccctcccacgacatggctgggctccctgctgttgttggtctgtctcctggcgagcaggagtatcaccgaggaggtgtcggagtactgtagccacatgattgggagtggacacctgcagtctctgcagcggctgattgacagtcagatggagacctcgtgccaaattacatttgagtttgtagaccaggaacagttgaaagatccagtgtgctaccttaagaaggcatttctcctggtacaagacataatggaggacaccatgcgcttcagagataacacccccaatgccatcgccattgtgcagctgcaggaactctctttgaggctgaagagctgcttcaccaaggattatgaagagcatgacaaggcctgcgtccgaactttctatgagacacctctccagttgctggagaaggtcaagaatgtctttaatgaaacaaagaatctccttgacaaggactggaatattttcagcaagaactgcaacaacagctttgctgaatgctccagccaagatgtggtgaccaagcctgattgcaactgcctgtaccccaaagccatccctagcagtgacccggcctctgtctcccctcatcagcccctcgccccctccatggcccctgtggctggcttgacctgggaggactctgagggaactgagggcagctccctcttgcctggtgagcagcccctgcacacagtggatccaggcagtgccaagcagcggccacccaggagcacctgccagagctttgagccgccagagaccccagttgtcaaggacagcaccatcggtggctcaccacagcctcgcccctctgtcggggccttcaaccccgggatggaggatattcttgactctgcaatgggcactaattgggtcccagaagaagcctctggagaggccagtgagattcccgtaccccaagggacagagctttccccctccaggccaggagggggcagcatgcagacagagcccgccagacccagcaacttcctctcagcatcttctccactccctgcatcagcaaagggccaacagccggcagatgtaactggtacagccttgcccagggtgggccccgtgaggcccactggccaggactggaatcacaccccccagaagacagaccatccatctgccctgctcagagaccccccggagccaggctctcccaggatctcatcactgcgcccccagggcctcagcaacccctccaccctctctgctcagccacagctttccagaagccactcctcgggcagcgtgctgccccttggggagctggagggcaggaggagcaccagggatcggaggagccccgcagagccagaaggaggaccagcaagtgaaggggcagccaggcccctgccccgttttaactccgttcctttgactgacacaggccatgagaggcagtccgagggatcctccagcccgcagctccaggagtctgtcttccacctgctggtgcccagtgtcatcctggtcttgctggccgtcggaggcctcttgttctacaggtggaggcggcggagccatcaagagcctcagagagcggattctcccttggagcaaccagagggcagccccctgactcaggatgacagacaggtggaactgccagtgtagagggaattctaagctggacgcacagaacagtctctccgtgggaggagacattatggggcgtccaccaccacccctccctggccatcctcctggaatgtggtctgccctccaccagagctcctgcctgccaggactggaccagagcagccaggctggggcccctctgtctcaacccgcagacccttgactgaatgagagaggccagaggatgctccccatgctgccactatttattgtgagccctggaggctcccatgtgcttgaggaaggctggtgagcccggctcaggaccctcttccctcaggggctgcaccctcctctcactcccttccatgccggaacccaggccagggacccaccggcctgtggtttgtgggaaagcagggtggacgctgaggagtgaaagaaccctgcacccagagggcctgcctggtgccaaggtatcccagcctggacaggcatggacctgtctccagagagaggagcctgaagttcgtggggcgggacagcgtcggcctgatttcccgtaaaggtgtgcagcctgagagacgggaagaggaggcctctggacctgctggtctgcactgacagcctgaagggtctacaccctcggctcacctaagtgccctgtgctggttgccaggcgcagaggggaggccagccctgccctcaggacctgcctgacctgccagtgatgccaagagggggatcaagcactggcctctgcccctcctccttccagcacctgccagagcttctccaggaggccaagcagaggctcccctcatgaaggaagccattgcactgtgaacactgtacctgcctgctgaacagcctgcccccgtccatccatgagccagcatccgtccgtcctccactctccagcctctcccca

SEQ ID NO: 30 - DNA, 767 bp, Homo sapiens
cggaggatgtggctgcagagcctgctgctcttgggcactgtggcctgcagcatctctgcacccgcccgctcgcccagccccagcacgcagccctgggagcatgtgaatgccatccaggaggcccggcgtctcctgaacctgagtagagacactgctgctgagatgaatgaaacagtagaagtcatctcagaaatgtttgacctccaggagccgacctgcctacagacccgcctggagctgtacaagcagggcctgcggggcagcctcaccaagctcaagggccccttgaccatgatagccagccactacaagcagcactgccctccaaccccggaaacttcctgtgcaacccagattatcacctttgaaagtttcaaagagaacctgaaggactttctgcttgtcatcccctttgactgctgggagccagtccaggagtgagaccggccagatgaggctggccaagccggggagctgctctctcatgaaacaagagctagaaactcaggatggtcatcttggagggaccaaggggtgggccacagccatggtgggagtggcctggacctgccctgggccacactgaccctgatacaggcatggcagaagaatgggaatattttatactgacagaaatcagtaatatttatatatttatatttttaaaatatttatttatttatttatttaagttcatattccatatttattcaagatgttttaccgtaataattattattaaaaatatgcttctaaaaaaaaaaaaa

SEQ ID NO: 31 - DNA, 775 bp, Homo sapiens
aaggacacgggcagcagacagtggtcagtcctttcttggctctgctgacactcgagcccacattccgtcacctgctcagaatcatgcaggtctccactgctgcccttgctgtcctcctctgcaccatggctctctgcaaccagttctctgcatcacttgctgctgacacgccgaccgcctgctgcttcagctacacctcccggcagattccacagaatttcatagctgactactttgagacgagcagccagtgctccaagcccggtgtcatcttcctaaccaagcgaagccggcaggtctgtgctgaccccagtgaggagtgggtccagaaatatgtcagcgacctggagctgagtgcctgaggggtccagaagcttcgaggcccagcgacctcggtgggcccagtggggaggagcaggagcctgagccttgggaacatgcgtgtgacctccacagctacctcttctatggactggttgttgccaaacagccacactgtgggactcttcttaacttaaattttaatttatttatactatttagtttttgtaatttattttcgatttcacagtgtgtttgtgattgtttgctctgagagttcccctgtcccctcccccttccctcacaccgcgtctggtgacaaccgagtggctgtcatcagcctgtgtaggcagtcatggcaccaaagccaccagactgacaaatgtgtatcggatgcttttgttcagggctgtgatcggcctggggaaataataaagatgctcttttaaaaggt

SEQ ID NO: 32 - DNA, 463 bp, Homo sapiens
gagctccgggccgccgctccgacgggccagcgccctccccatgtccctgctcccacgccgcgcccctccggtcagcatgaggctcctggcggccgcgctgctcctgctgctgctggcgctgtacaccgcgcgtgtggacgggtccaaatgcaagtgctcccggaagggacccaagatccgctacagcgacgtgaagaagctggaaatgaagccaaagtacccgcactgcgaggagaagatggttatcatcaccaccaagagcgtgtccaggtaccgaggtcaggagcactgcctgcaccccaagctgcagagcaccaagcgcttcatcaagtggtacaacgcctggaacgagaagcgcaggttctacgaagaatagggtgaaaaacctcagaagggaaaactccaaaccagttgggagacttgtggcaaaggaactttgcagattaaaaaaaaaaaaaaaaaa

SEQ ID NO: 33 - DNA, 2167 bp, Homo sapiens
ctgcaggaaccaatacccataggctatttgtataaatgggccatggggcctcccagctggaggctggctggtgccacgagggtcccacaggcatgggtgtccttcctatatcacatggccttcactgagactggtatatggattgcacctatcagagaccaaggacaggacctccctggaaatctctgaggacctggcctgtgatccagttgctgccttgtcctcttcctgctatgtcatggcttatcttctttcacccattcattcattcattcattcattcagcagtattagtcaatgtctcttgatatgcctggcacctgctagatggtccccgagtttaccattagtggaaaagacatttaagaaattcaccaagggctctatgagaggccatacacggtggacctgactagggtgtggcttccctgaggagctgaagttgcccagaggcccagagaaggggagctgagcacgtttgaaccactgaacctgctctggacctcgcctccttccttcggtgcctcccagcatcctatcctctttaaagagcaggggttcagggaagttccctggatggtgattcgcaggggcagctcccctctcacctgccgcatgactaccccgccccatctcaaacacacaagctcacgcatgcgggactggagcccttgaggacatgtggcccaaagacaggaggtacaggggctcagtgcgtgcagtggaatgaactgggcttcatctctggaagggtaaggggccatcttccgggttcaccgccgcatccccacccccggcacagcgcctcctggcgactaacatcggtgacttagtgaaaggactaagaaagacccgaggcgaggccggaacaggccgatttctagccgccaagtggagaacaggttggagcggtgcgccgggcttagcggcggttgctggaggaacgggcggagtcgcccagggtcctgccctgcgggggtcgagccgaggcaggcggtgacttccccactcggggcggagccgcagcctcgcgggggcggggcctggcgccggcggtggcgtcacaaaaggcgggaccacagtggtgtccgagaagtcaggcacgtagctcagcggcggccgcggcgcgtgcgtctgtgcctctgcgcgggtctcctggtccttctgccatcatgccgatgttcatcgtaaacaccaacgtgccccgcgcctccgtgccggacgggttcctctccgagctcacccagcagctggcgcaggccaccggcaagcccccccaggtttgccgggaggggacaggaagaggggggtgcccaccggacgaggggttccgcgctgggagctggggaggcgactcctgaacggagctggggggcggggcggggggaggacggtggctcgggcccgaagtggacgttcggggcccgacgaggtcgctggggcgggctgaccgcgccctttcctcgcagtacatcgcggtgcacgtggtcccggaccagctcatggccttcggcggctccagcgagccgtgcgcgctctgcagcctgcacagcatcggcaagatcggcggcgcgcagaaccgctcctacagcaagctgctgtgcggcctgctggccgagcgcctgcgcatcagcccggacaggtacgcggagtcgcggaggggcgggggaggggcggcggcgcgcggccaggcccgggactgagccacccgctgagtccggcctcctccccccgcagggtctacatcaactattacgacatgaacgcggccaatgtgggctggaacaactccaccttcgcctaagagccgcagggacccacgctgtctgcgctggctccacccgggaacccgccgcacgctgtgttctaggcccgcccaccccaaccttctggtggggagaaataaacggtttagagactaggagtgcctcggggttccttggcttgcgggaggaattggtgcagagccgggacattggggagcgaggtcgggaaacggtgttgggggcgggggtcagggccgggttgctctcctcgaacctgctgttcgggagcccttttgtccagcctgtccctcctacgctcctaacagaggagccccagtgtctttccattctatggcgtacgaagggatgaggagaagttggcactctgccctgggctgcag

SEQ ID NO: 34 - DNA, 2104 bp, Homo sapiens
gggtgccttcagcccaacctccccagccccacgggcgccacggaacccgctcgatctcgccgccaactggtagacatggagacccctgcctggccccgggtcccgcgccccgagaccgccgtcgctcggacgctcctgctcggctgggtcttcgcccaggtggccggcgcttcaggcactacaaatactgtggcagcatataatttaacttggaaatcaactaatttcaagacaattttggagtgggaacccaaacccgtcaatcaagtctacactgttcaaataagcactaagtcaggagattggaaaagcaaatgcttttacacaacagacacagagtgtgacctcaccgacgagattgtgaaggatgtgaagcagacgtacttggcacgggtcttctcctacccggcagggaatgtggagagcaccggttctgctggggagcctctgtatgagaactccccagagttcacaccttacctggagacaaacctcggacagccaacaattcagagttttgaacaggtgggaacaaaagtgaatgtgaccgtagaagatgaacggactttagtcagaaggaacaacactttcctaagcctccgggatgtttttggcaaggacttaatttatacactttattattggaaatcttcaagttcaggaaagaaaacagccaaaacaaacactaatgagtttttgattgatgtggataaaggagaaaactactgtttcagtgttcaagcagtgattccctcccgaacagttaaccggaagagtacagacagcccggtagagtgtatgggccaggagaaaggggaattcagagaaatattctacatcattggagctgtggcatttgtggtcatcatccttgtcatcatcctggctatatctctacacaagtgtagaaaggcaggagtggggcagagctggaaggagaactccccactgaatgtttcataaaggaagcactgttggagctactgcaaatgctatattgcactgtgaccgagaacttttaagaggatagaatacatggaaacgcaaatgagtatttcggagcatgaagaccctggagttcaaaaaactcttgatatgacctgttattaccattagcattctggttttgacatcagcattagtcactttgaaatgtaacgaatggtactacaaccaattccaagttttaatttttaacaccatggcaccttttgcacataacatgctttagattatatattccgcactcaaggagtaaccaggtcgtccaagcaaaaacaaatgggaaaatgtcttaaaaaatcctgggtggacttttgaaaagctttttttttttttttttttttgagacggagtcttgctctgttgcccaggctggagtgcagtagcatgatctcggctcactgcaccctccgtctctcgggttcaagcaattgtctgcctcagcctcccgagtagctgggattacaggtgcgcactaccacaccaagctaatttttgtattttttagtagagatggggtttcaccatcttggccaggctggtcttgaattcctgacctcaggtgatccacccaccttggcctcccaaagtgctagtattatgggcgtgaaccaccatgcccagccgaaaagcttttgaggggctgacttcaatccatgtaggaaagtaaaatggaaggaaattgggtgcatttctaggacttttctaacatatgtctataatatagtgtttaggttctttttttttttcaggaatacatttggaaattcaaaacaattggcaaactttgtattaatgtgttaagtgcaggagacattggtattctgggcaccttcctaatatgctttacaatctgcactttaactgacttaagtggcattaaacatttgagagctaactatatttttataagactactatacaaactacagagtttatgatttaaggtacttaaagcttctatggttgacattgtatatataattttttaaaaaggttttctatatggggattttctatttacgtaggtaatattgttctatttgtatatattgagataatttatttaatatactttaaataaaggtggactgggattgtt

SEQ ID NO: 35 - DNA, 739 bp, Homo sapiens
ctaacccagaaacatccaattctcaaactgaagctcgcactctcgcctccagcatgaaagtctctgccgcccttctgtgcctgctgctcatagcagccaccttcattccccaagggctcgctcagccagatgcaatcaatgccccagtcacctgctgttataacttcaccaataggaagatctcagtgcagaggctcgcgagctatagaagaatcaccagcagcaagtgtcccaaagaagctgtgatcttcaagaccattgtggccaaggagatctgtgctgaccccaagcagaagtgggttcaggattccatggaccacctggacaagcaaacccaaactccgaagacttgaacactcactccacaacccaagaatctgcagctaacttattttcccctagctttccccagacaccctgttttattttattataatgaattttgtttgttgatgtgaaacattatgccttaagtaatgttaattcttatttaagttattgatgttttaagtttatctttcatggtactagtgttttttagatacagagacttggggaaattgcttttcctcttgaaccacagttctacccctgggatgttttgagggtctttgcaagaatcattaatacaaagaattttttttaacattccaatgcattgctaaaatattattgtggaaatgaatattttgtaactattacaccaaataaatatatttttgtacaaaaaaaaaaaaaa

SEQ ID NO: 36 - DNA, 1351 bp, Homo sapiens
gtgatggagagcaccagcaaagccttagggcccatccctggcctcctgttacccacagaggggtaggcccttggctctcttccactatgacgtcagcttccattcttcctttcttatagacaattttccatttcaaggaaatcagagcccttaatagttcagtgaggtcactttgctgagcacaatcccatacccttcagcctctgctccacagagcctaagcaaaagatagaaactcacaacttccttgttttgttatctggaaattatcccaggatctggtgcttactcagcatattcaaggaaggtcttacttcattcttccttgattgtgaccatgcccaggctctctgctccctataaaaggcaggcagagccaccgaggagcagagaggttgagaacaacccagaaaccttcacctctcatgctgaagctcacacccttgccctccaagatgaaggtttctgcagcgcttctgtgcctgctgctcatggcagccactttcagccctcagggacttgctcagccagattcagtttccattccaatcacctgctgctttaacgtgatcaataggaaaattcctatccagaggctggagagctacacaagaatcaccaacatccaatgtcccaaggaagctgtgatcttcaagaccaaacggggcaaggaggtctgtgctgaccccaaggagagatgggtcagggattccatgaagcatctggaccaaatatttcaaaatctgaagccatgagccttcatacatggactgagagtcagagcttgaagaaaagcttatttattttccccaacctcccccaggtgcagtgtgacattattttattataacatccacaaagagattatttttaaataatttaaagcataatatttcttaaaaagtatttaattatatttaagttgttgatgttttaactctatctgtcatacatcctagtgaatgtaaaatgcaaaatcctggtgatgtgttttttgtttttgttttcctgtgagctcaactaagttcacggcaaaatgtcattgttctccctcctacctgtctgtagtgttgtggggtcctcccatggatcatcaaggtgaaacactttggtattctttggcaatcagtgctcctgtaagtcaaatgtgtgctttgtactgctgttgttgaaattgatgttactgtatataactatggaattttgaaaaaaaatttcaaaaagaaaaaaatatatataatttaaaactaaaaaaaaaaaaaaaaaaaaaaaaaaaaaaaaaaaaaaaaaaaaaaaaaaaaaaaaaaaaaaaaaaaaaaaaaaaaaaaaaaaaaaaaaaaaaaaaaaaaaa

SEQ ID NO: 37 - DNA, 1085 bp, Homo sapiens
ggtttctattgacttgggttaatcgtgtgaccgcggtggctggcacgaaattgaccaaccctggggttagtatagcttagttaaactttcgtttattgctaaaggttaatcactgctgtttcccgtgggggtgtggctaggctaagcgttttgagctgcattgctgcgtgcttgatgcttgtcccttttgatcgtggtgatttagagggtgaactcactggaatggggatgcttgcatgtgtaatcttactaagagctaatagaaaggctaggaccaaaccagaaacctccaattctcatgtggaagcccatgccctcaccctccaacatgaaagcctctgcagcacttctgtgtctgctgctcacagcagctgctttcagcccccaggggcttgctcagccagttgggattaatacttcaactacctgctgctacagatttatcaataagaaaatccctaagcagaggctggagagctacagaaggaccaccagtagccactgtccccgggaagctgtaatcttcaagaccaaactggacaaggagatctgtgctgaccccacacagaagtgggtccaggactttatgaagcacctggacaagaaaacccaaactccaaagctttgaacattcatgactgaactgaaaacaagccatgacttgagaaacaaataatttgtataccctgtcctttctcagagtggttctgagattattttaatctaattctaaggaatatgagctttatgtaataatgtgaatcatggtttttcttagtagattttaaaagttattaatattttaatttaatcttccatggattttggtgggttttgaacataaagccttggatgtatatgtcatctcagtgctgtaaaaactgtgggatgctcctcccttctctacctcatgggggtattgtataagtccttgcaagaatcagtgcaaagatttgctttaattgttaagatatgatgtccctatggaagcatattgttattatataattacatatttgcatatgtatgactcccaaattttcacataaaatagatttttgtataacaaaaaaaaaaaaaaaaaa

SEQ ID NO: 38 - DNA, 1085 bp, Homo sapiens; identical to SEQ ID NO: 37

SEQ ID NO: 39 - DNA, 3310 bp, Homo sapiens
ggcacgagggcactgagctctgccgcctggctctagccgcctgcctggcccccgccgggactcttgcccaccctcagccatggctccgatatctctgtcgtggctgctccgcttggccaccttctgccatctgactgtcctgctggctggacagcaccacggtgtgacgaaatgcaacatcacgtgcagcaagatgacatcaaagatacctgtagctttgctcatccactatcaacagaaccaggcatcatgcggcaaacgcgcaatcatcttggagacgagacagcacaggctgttctgtgccgacccgaaggagcaatgggtcaaggacgcgatgcagcatctggaccgccaggctgctgccctaactcgaaatggcggcaccttcgagaagcagatcggcgaggtgaagcccaggaccacccctgccgccgggggaatggacgagtctgtggtcctggagcccgaagccacaggcgaaagcagtagcctggagccgactccttcttcccaggaagcacagagggccctggggacctccccagagctgccgacgggcgtgactggttcctcagggaccaggctccccccgacgccaaaggctcaggatggagggcctgtgggcacggagcttttccgagtgcctcccgtctccactgccgccacgtggcagagttctgctccccaccaacctgggcccagcctctgggctgaggcaaagacctctgaggccccgtccacccaggacccctccacccaggcctccactgcgtcctccccagccccagaggagaatgctccgtctgaaggccagcgtgtgtggggtcagggacagagccccaggccagagaactctctggagcgggaggagatgggtcccgtgccagcgcacacggatgccttccaggactgggggcctggcagcatggcccacgtctctgtggtccctgtctcctcagaagggacccccagcagggagccagtggcttcaggcagctggacccctaaggctgaggaacccatccatgccaccatggacccccagaggctgggcgtccttatcactcctgtccctgacgcccaggctgccacccggaggcaggcggtggggctgctggccttccttggcctcctcttctgcctgggggtggccatgttcacctaccagagcctccagggctgccctcgaaagatggcaggagagatggcggagggccttcgctacatcccccggagctgtggtagtaattcatatgtcctggtgcccgtgtgaactcctctggcctgtgtctagttgtttgattcagacagctgcctgggatccctcatcctcatacccacccccacccaagggcctggcctgagctgggatgattggaggggggaggtgggatcctccaggtgcacaagctccaagctcccaggcattccccaggaggccagccttgaccattctccaccttccagggacagagggggtggcctcccaactcaccccagccccaaaactctcctctgctgctggctggttagaggttccctttgacgccatcccagccccaatgaacaattatttattaaatgcccagccccttctgacccatgctgccctgtgagtactacagtcctcccatctcacacatgagcatcaggccaggccctctgcccactccctgcaacctgattgtgtctcttggtcctgctgcagttgccagtcaccccggccacctgcggtgctatctcccccagccccatcctctgtacagagcccacgcccccactggtgacatgtcttttcttgcatgaggctagtgtggtgtttcctgggcactgcttccagtgaggctctgcccttggttaggsattgtgggaaggggagataagggtatctggtgactttcctctttggtctacactgtgctgagtctgaaggctgggttctgatcctagttccaccatcaagccaccaacatactcccatctgtgaaaggaaagagggaggtaaggaatacctgtccccctgacaacactcattgacctgaggcccttctctccagcccctggatgcagcctcacagtccttaccagcagagcaccttagacagtccctgccaatggactaacttgtctttggaccctgaggcccagagggcctgcargggagtgagttgatagcacagaccctgccctgtgggcccccaaatggaaatgggcagagcagagaccatccctgaaggccccgcccaggcttagtcactgagacagcccgggctctgcttcccatcacccgctaagagggagggagggctccagacacatgtccaagaagcccaggaaaggctccaggagcagccacattcctgatgcttcttcagagactcctgcaggcagccaggccacaagacccttgtggtcccaccccacacacgccagattctttcctgaggctgggctcccttcccacctctctcactccttgaaaacactgttctctgccctccaagaccttctccttcacctttgtccccaccgcagacaggaccaggggatttccatgatgttttccatgagtcccctgtttgtttctgaaagggacgctacccgggaagggggctgggacatgggaaaggggaagttgtaggcataaagtcaggggttcccttttttggctgctgaaggctcgagcatgcctggatggggctgcaccggctggcctggcccctcagggtccctggtggcagctcacctctcccttggattgtccccgacccttgccgtctacctgaggggcctcttatgggctgggttctacccaggtgctaggaacactccttcacagatgggtgcttggaggaaggaaacccagctctggtccatagagagcaaaacgctgtgctgccctgcccaccctggcctctgcactcccctgctgggtgtggcgcagcatattcaggaagctcagggccctggctcaggtggggtcactctggcagctcagagagggtgggagtgggtccaatgcactttgttctggctcttccaggctgggagagcctttcaggggtgggacaccctgtgatggggccctgcctcctttgtgaggaagccgctggggccagttggtcccccttccatggactttgttagtttctccaagcaggacatggacaaggatgatctaggaagactttggaaagagtaggaagactttggaaagacttttccaaccctcatcaccaacgtctgtgccattttgtattttactaataaaatttaaaagtcttgtgaaaaaaaaaaaaaaaaaaaaaaa

SEQ ID NO: 40 - DNA, 3541 bp, Homo sapiens
  misc_feature (1282)..(1282): n is a, c, g, or t
  misc_feature (1522)..(1522): n is a, c, g, or t
  misc_feature (1840)..(1841): n is a, c, g, or t
  misc_feature (1845)..(1845): n is a, c, g, or t
  misc_feature (1851)..(1851): n is a, c, g, or t
  misc_feature (1855)..(1855): n is a, c, g, or t
  misc_feature (1864)..(1864): n is a, c, g, or t
  misc_feature (1903)..(1903): n is a, c, g, or t
  misc_feature (2109)..(2109): n is a, c, g, or t
  misc_feature (2218)..(2218): n is a, c, g, or t
  misc_feature (2476)..(2476): n is a, c, g, or t
  misc_feature (2488)..(2488): n is a, c, g, or t
  misc_feature (2574)..(2574): n is a, c, g, or t
  misc_feature (2734)..(2734): n is a, c, g, or t
  misc_feature (2753)..(2753): n is a, c, g, or t
  misc_feature (2774)..(2774): n is a, c, g, or t
  misc_feature (3259)..(3259): n is a, c, g, or t
  misc_feature (3381)..(3381): n is a, c, g, or t
  misc_feature (3398)..(3398): n is a, c, g, or t
cgcggccgcagccgcattgcccgctcggcgtccggcccccgacccgcgctcgtccgcccgcccgcccgcccgcccgcgccatgaacgccaaggtcgtggtcgtgctggtcctcgtgctgaccgcgctctgcctcagcgacgggaagcccgtcagcctgagctacagatgcccatgccgattcttcgaaagccatgttgccagagccaacgtcaagcatctcaaaattctcaacactccaaactgtgcccttcagattgtagcccggctgaagaacaacaacagacaagtgtgcattgacccgaagctaaagtggattcaggagtacctggagaaagctttaaacaagaggttcaagatgtgagagggtcagacgcctgaggaacccttacagtaggagtccagctctgaaaccagtgttagggaagggcctgccacagcctcccctgccagggcagggccccaggcattgccaagggctttgttttggacactttgccatattttcaccatttgattatgtagcaaaatacatgacatttatttttcatttagtttgattattcagtgtcactggcgacacgtagcagcttagactaaggccattattgtacttgccttattagagtgtctttccacggagccactcctctgactcagggctcctgggttttggattctctgagctgtgcaggtggggagactgggctgagggagcctggccccatggtcagccctagggtggagagccaccaagagggacgcctgggggtgtcaggaccagtcaacctgggcaaagcctagtgaaggcttctctctgtgggatgggatggtggagggccacatgggaggttcacccccttctccatccacatggtgagccgggtctgcctcttctgggagggcagcagggctaccctgagctgaggcagcagtgtgaggccagggcagagtgagacccagccctcatcccgagcacctccacatcctccacgttctgctcatcattctctgtctcatccatcatcatgtgtgtccacgactgtctccatggccccgcaaaaggactctcaggaccaaagctttcatgtaaactgtgcaccaagcaggaaatgaaaatgtcttgtgttacctgaaaacactgtgcacatctgtgtcttgtttggaatattgtccattgtccaatcctatgtttttggtcaaagccagcgtcctcctctgtgaccaatgtcttgatgcatgcactgttccccctgtgcagccgctgagcgaggagatgctccntgggccctttgagtgcagtcctgatcagagccgtggtcctttggggtgaactaccttggttcccccactgatcacaaaaacatggtgggtccatgggcagagcccaagggaattcggtgtgcaccagggttgaccccagaggattgctgccccatcagtgctccctcacatgtcagtaccttcaaactagggccaagcccagcactgcttgaggaaaacaagcattcacaacttgttttnggtttttaaaacccagtccacaaaataaccaatcctggacatgaagattctttcccaattcacatctaacctcatcttcttcaccatttggcaatgccatcatctcctgccttcctcctgggccctctctgctctgcgtgtcacctgtgcttcgggcccttcccacaggacatttctctaagagaacaatgtgctatgtgaagagtaagtcaacctgcctgacatttggagtgttccccttccactgagggcagtcgatagagctgtattaagccacttaaaatgtttgtcactttgccaaggcaagcacttgtgggnnttgnttgttntcantcagtcttncgaatactttttccccttgataaagactccagttaaaanaaattttaatgaagaaagtggaaacaaggaagtcaaagcaaggaaactatgtaacatgtaggaagtaggaagtaaattatagtgatgtaatcttgaattgtaactgttcttgaatttaataatctgtagggtaattagtaacatgtgttaagtattttcataagtatttcaaattggagcttcatggcagaaggcaaacccatcancaaaaattgtcccttaaacaaaaattaaaatcctcaatccagctatgttatattgaaaaaatagagcctgagggatctttactagttataaagatacagaactctttcnaaaccttttgaaattaacctctcactataccagtataattgagttttcagtggggcagtcattatccaggtaatccaagatattttaaaatctgtcacgtagaacttggatgtacctgcccccaatccatgaaccaagaccattgaattcttggttgaggaaacaaacatgaccctaaatcttgactacagtcaggaaaggaatcatttctatttctcctccatgggagaaaatagataagagtagaaactgcagggnaaaattatttgnataacaattcctctactaacaatcagctccttcctggagactgcccagctaaagcaatatgcatttaaatacagtcttccatttgnaagggaaaagtctcttgtaatccgaatctctttttggtttcgaactgctagtcaagtgcgtccacgagctgtttactagggatccctcatctgtccctccgggacctggtgctgcctctacctgacactcccttgggctccctgtaacctcttcagaggncctcgctgccagctctgtntcaggacccagaggaaggggncagaggctcgttgactggctgtgtgttgggattgagtctgtgccacgtgtttgtgctgtggtgtgtcccctctgtccaggcactgagataccagcgaggaggctccagagggcgctctgcttgttattagagattacctcctgagaaaaaaggttccgcttggagcagaggggctgaatagcagaaggttgcacctcccccaaccttagatgttctaagtctttccattggatctcattggacccttccatggtgtgatcgtctgactggtgttatcaccgtgggctccctgactgggagttgatcgcctttcccaggtgctacacccttttccagctggatgagaatttgagtgctctgatccctctacagagcttccctgactcattctgaaggagccccattcctgggaaatattccctagaaacttccaaatcccctaagcagaccactgataaaaccatgtagaaaatttgttattttgnaacctcgctggactctcagtctctgagcagtgaatgattcagtgttaaatgtgatgaatactgtattttgtattgtttcaattgcatctcccagataatgtgaaaatggtccaggagaaggncaattcctatacgcagngtgctttaaaaaataaataagaaacaactctttgagaaacaacaatttctactttgaagtcataccaatgaaaaaatgtatatgcacttataattttcctaataaagttctgtactcaaatgtaaaaaaaaaaaaaaaaaaaa

SEQ ID NO: 41 - DNA, 1722 bp, Homo sapiens
ggggaaaagagctaggaaagagctgcaaagcagtgtgggctttttccctttttttgctccttttcattacccctcctccgttttcacccttctccggacttcgcgtagaacctgcgaatttcgaagaggaggtggcaaagtgggagaaaagaggtgttagggtttggggtttttttgtttttgtttttgttttttaatttcttgatttcaacattttctcccaccctctcggctgcagccaacgcctcttacctgttctgcggcgccgcgcaccgctggcagctgagggttagaaagcggggtgtattttagattttaagcaaaaattttaaagataaatccatttttctctcccacccccaacgccatctccactgcatccgatctcattatttcggtggttgcttgggggtgaacaattttgtggctttttttcccctataattctgacccgctcaggcttgagggtttctccggcctccgctcactgcgtgcacctggcgctgccctgcttcccccaacctgttgcaaggctttaattcttgcaactgggacctgctcgcaggcaccccagccctccacctctctctacatttttgcaagtgtctgggggagggcacctgctctacctgccagaaattttaaaacaaaaacaaaaacaaaaaaatctccgggggccctcttggcccctttatccctgcactctcgctctcctgccccaccccgaggtaaagggggcgactaagagaagatggtgttgctcaccgcggtcctcctgctgctggccgcctatgcggggccggcccagagcctgggctccttcgtgcactgcgagccctgcgacgagaaagccctctccatgtgcccccccagccccctgggctgcgagctggtcaaggagccgggctgcggctgctgcatgacctgcgccctggccgaggggcagtcgtgcggcgtctacaccgagcgctgcgcccaggggctgcgctgcctcccccggcaggacgaggagaagccgctgcacgccctgctgcacggccgcggggtttgcctcaacgaaaagagctaccgcgagcaagtcaagatcgagagagactcccgtgagcacgaggagcccaccacctctgagatggccgaggagacctactcccccaagatcttccggcccaaacacacccgcatctccgagctgaaggctgaagcagtgaagaaggaccgcagaaagaagctgacccagtccaagtttgtcgggggagccgagaacactgcccacccccggatcatctctgcacctgagatgagacaggagtctgagcagggcccctgccgcagacacatggaggcttccctgcaggagctcaaagccagcccacgcatggtgccccgtgctgtgtacctgcccaattgtgaccgcaaaggattctacaagagaaagcagtgcaaaccttcccgtggccgcaagcgtggcatctgctggtgcgtggacaagtacgggatgaagctgccaggcatggagtacgttgacggggactttcagtgccacaccttcgacagcagcaacgttgagtgatgcgtccccccccaacctttccctcaccccctcccacccccagccccgactccagccagcgcctccctccaccccaggacgccactcatttcatctcatttaagggaaaaatatatatctatctatttgaggaaaaaaaaaaaaaaaaaaaa

SEQ ID NO: 42 - DNA, 1816 bp, Homo sapiens
gggtaaaaccatttgtttaattctaaatcaaatcactttcacaacagtgaaaattagtgactggttaaggtgtgccactgtacatatcatcattttctgactggggtcaggacctggtcctagtccacaagggtggcaggaggagggtggaggctaagaacacagaaaacacacaaaagaaaggaaagctgccttggcagaaggatgaggtggtgagcttgccgagggatggtgggaagggggctccctgttggggccgagccaggagtcccaagtcagctctcctgccttacttagctcctggcagagggtgagtggggacctacgaggttcaaaatcaaatggcatttggccaggctggctttactaacaggttcccagagtgcctctgttggctgagctctcctgggctactcatttcattgaagagtccaaatgattcattttcctacccacaacttttcattattcttctggaaacccatttctgttgagtccatctgacttaagtcctctctccctccactagttggggccactgcactgaggggggtcccaccaattctctctagagaagagacactccagaggcccctgcaactttgcggatttccagaaggtgataaaaagagcactcttgagtgggtgcccaggaatgtttaaaatctatcaggcacactataaagctggtggtttcttcctaccaagtggattcggcatatgaaccacctactcaatactttatattttgtctgtttaaacactgaactctggtgttgacaggtacaaggagaagagatggggactatgaagaggggagggcttccctcatcttcctcaagatctttgtttccacaaactatgcagtcataatttgagaaaaagcaatagatggggcttcctaccatttgttggttattgctggggttagccaggagcagtgtggatggcaaagtaggagagaggcccagaggaaagcccatctccctccagctttggggtctccagaaagaggctggatttctgggatgaagcctagaaggcagagcaagaactgttccaccaggtgaacagtcctacctgcttggtaccatagtccctcaataagattcagaggaagaagcttatgaaactgaaaatcaaatcaaggtattgggaagaataatttcccctcgattccacaggagggaagaccacacaatatcattgtgctggggctccccaaggccctgccacctggctttacaaatcatcaggggttgcctgcttggcagtcacatgcttccctggttttagcacacatacaaggagttttcagggaactctatcaagccataccaaaatcagggtcacatgtgggtttcccctttccttgcctcttcataaaagacaacttggcttctgaggatggtggtcttttgcatgcagttgggctgacctgacaaagcccccagtttcctgtggcaggttctgggagaggatgcattcaagcttctgcagcctaggggacagggctgcttgttcagttattactgcctcggagctcaaatcccaccgaagtcctgactccaggtctttcctaatgcacagtagtcagtctcagcttcggcagtattctcggctgtatgttctctggcagagagaggcagatgaacatagttttagggagaaagctgatgggaaacctgtgagttaagccacatgtctcaccaggaataatttatgccaggaaaccaggaagtcattcaagttgttctctgaggccaaagacactgagcacagcccagagccaataaaagatctttgagtctctggt

SEQ ID NO: 43 - DNA, 2632 bp, Homo sapiens
ttctcttttaacagtgtttggtgttgcaagcaggatccaaaggagacctatagtgactcccaggagctcttagtgaccaagtgaaggtacctgtggggctcattgtgcccattgctctttcactgctttcaactggtagttgtgggttgaagcactggacaatgccacatactttgtggatggtgtgggtcttgggggtcatcatcagcctctccaaggaagaatcctccaatcaggcttctctgtcttgtgaccgcaatggtatctgcaagggcagctcaggatctttaaactccattccctcagggctcacagaagctgtaaaaagccttgacctgtccaacaacaggatcacctacattagcaacagtgacctacagaggtgtgtgaacctccaggctctggtgctgacatccaatggaattaacacaatagaggaagattctttttcttccctgggcagtcttgaacatttagacttatcctataattacttatctaatttatcgtcttcctggttcaagcccctttcttctttaacattcttaaacttactgggaaatccttacaaaaccctaggggaaacatctcttttttctcatctcacaaaattgcaaatcctgagagtgggaaatatggacaccttcactaagattcaaagaaaagattttgctggacttaccttccttgaggaacttgagattgatgcttcagatctacagagctatgagccaaaaagtttgaagtcaattcagaatgtaagtcatctgatccttcatatgaagcagcatattttactgctggagatttttgtagatgttacaagttccgtggaatgtttggaactgcgagatactgatttggacactttccatttttcagaactatccactggtgaaacaaattcattgattaaaaagtttacatttagaaatgtgaaaatcaccgatgaaagtttgtttcaggttatgaaacttttgaatcagatttctggattgttagaattagagtttgatgactgtacccttaatggagttggtaattttagagcatctgataatgacagagttatagatccaggtaaagtggaaacgttaacaatccggaggctgcatattccaaggttttacttattttatgatctgagcactttatattcacttacagaaagagttaaaagaatcacagtagaaaacagtaaagtttttctggttccttgtttactttcacaacatttaaaatcattagaatacttggatctcagtgaaaatttgatggttgaagaatacttgaaaaattcagcctgtgaggatgcctggccctctctacaaactttaattttaaggcaaaatcatttggcatcattggaaaaaaccggagagactttgctcactctgaaaaacttgactaacattgatatcagtaagaatagttttcattctatgcctgaaacttgtcagtggccagaaaagatgaaatatttgaacttatccagcacacgaatacacagtgtaacaggctgcattcccaagacactggaaattttagatgttagcaacaacaatctcaatttattttctttgaatttgccgcaactcaaagaactttatatttccagaaataagttgatgactctaccagatgcctccctcttacccatgttactagtattgaaaatcagtaggaatgcaataactacgttttctaaggagcaacttgactcatttcacacactgaagactttggaagctggtggcaataacttcatttgctcctgtgaattcctctccttcactcaggagcagcaagcactggccaaagtcttgattgattggccagcaaattacctgtgtgactctccatcccatgtgcgtggccagcaggttcaggatgtccgcctctcggtgtcggaatgtcacaggacagcactggtgtctggcatgtgctgtgctctgttcctgctgatcctgctcacgggggtcctgtgccaccgtttccatggcctgtggtatatgaaaatgatgtgggcctggctccaggccaaaaggaagcccaggaaagctcccagcaggaacatctgctatgatgcatttgtttcttacagtgagcgggatgcctactgggtggagaaccttatggtccaggagctggagaacttcaatccccccttcaagttgtgtcttcataagcgggacttcattcctggcaagtggatcattgacaatatcattgactccattgaaaagagccacaaaactgtctttgtgctttctgaaaactttgtgaagagtgagtggtgcaagtatgaactggacttctcccatttccgtctttttgatgagaacaatgatgctgccattctcattcttctggagcccattgagaaaaaagccattccccagcgcttctgcaagctgcggaagataatgaacaccaagacctacctggagtggcccatggacgaggctcagcgggaaggattttgggtaaatctgagagctgcgataaagtcctaggttcccatatttaagaccagtctttgtctagttgggatctttatgtcactagttatagttaagttcattcagacataattatataaaaactacgtggatgtaccgtcatttgagga

SEQ ID NO: 44 - DNA, 4832 bp, Homo sapiens
tgcctcagaaactgctcggtcagacggtgatagcgagccacgcattcacagggccactgctgctcacagaagcagtgaggatgatgccaggatgatgtctgcctcgcgcctggctgggactctgatcccagccatggccttcctctcctgcgtgagaccagaaagctgggagccctgcgtggaggtggttcctaatattacttatcaatgcatggagctgaatttctacaaaatccccgacaacctccccttctcaaccaagaacctggacctgagctttaatcccctgaggcatttaggcagctatagcttcttcagtttcccagaactgcaggtgctggatttatccaggtgtgaaatccagacaattgaagatggggcatatcagagcctaagccacctctctaccttaatattgacaggaaaccccatccagagtttagccctgggagccttttctggactatcaagtttacagaagctggtggctgtggagacaaatctagcatctctagagaacttccccattggacatctcaaaactttgaaagaacttaatgtggctcacaatcttatccaatctttcaaattacctgagtatttttctaatctgaccaatctagagcacttggacctttccagcaacaagattcaaagtatttattgcacagacttgcgggttctacatcaaatgcccctactcaatctctctttagacctgtccctgaaccctatgaactttatccaaccaggtgcatttaaagaaattaggcttcataagctgactttaagaaataattttgatagtttaaatgtaatgaaaacttgtattcaaggtctggctggtttagaagtccatcgtttggttctgggagaatttagaaatgaaggaaacttggaaaagtttgacaaatctgctctagagggcctgtgcaatttgaccattgaagaattccgattagcatacttagactactacctcgatgatattattgacttatttaattgtttgacaaatgtttcttcattttccctggtgagtgtgactattgaaagggtaaaagacttttcttataatttcggatggcaacatttagaattagttaactgtaaatttggacagtttcccacattgaaactcaaatctctcaaaaggcttactttcacttccaacaaaggtgggaatgctttttcagaagttgatctaccaagccttgagtttctagatctcagtagaaatggcttgagtttcaaaggttgctgttctcaaagtgattttgggacaaccagcctaaagtatttagatctgagcttcaatggtgttattaccatgagttcaaacttcttgggcttagaacaactagaacatctggatttccagcattccaatttgaaacaaatgagtgagttttcagtattcctatcactcagaaacctcatttaccttgacatttctcatactcacaccagagttgctttcaatggcatcttcaatggcttgtccagtctcgaagtcttgaaaatggctggcaattctttccaggaaaacttccttccagatatcttcacagagctgagaaacttgaccttcctggacctctctcagtgtcaactggagcagttgtctccaacagcatttaactcactctccagtcttcaggtactaaatatgagccacaacaacttcttttcattggatacgtttccttataagtgtctgaactccctccaggttcttgattacagtctcaatcacataatgacttccaaaaaacaggaactacagcattttccaagtagtctagctttcttaaatcttactcagaatgactttgcttgtacttgtgaacaccagagtttcctgcaatggatcaaggaccagaggcagctcttggtggaagttgaacgaatggaatgtgcaacaccttcagataagcagggcatgcctgtgctgagtttgaatatcacctgtcagatgaataagaccatcattggtgtgtcggtcctcagtgtgcttgtagtatctgttgtagcagttctggtctataagttctattttcacctgatgcttcttgctggctgcataaagtatggtagaggtgaaaacatctatgatgcctttgttatctactcaagccaggatgaggactgggtaaggaatgagctagtaaagaatttagaagaaggggtgcctccatttcagctctgccttcactacagagactttattcccggtgtggccattgctgccaacatcatccatgaaggtttccataaaagccgaaaggtgattgttgtggtgtcccagcacttcatccagagccgctggtgtatctttgaatatgagattgctcagacctggcagtttctgagcagtcgtgctggtatcatcttcattgtcctgcagaaggtggagaagaccctgctcaggcagcaggtggagctgtaccgccttctcagcaggaacacttacctggagtgggaggacagtgtcctggggcggcacatcttctggagacgactcagaaaagccctgctggatggtaaatcatggaatccagaaggaacagtgggtacaggatgcaattggcaggaagcaacatctatctgaagaggaaaaataaaaacctcctgaggcatttcttgcccagctgggtccaacacttgttcagttaataagtattaaatgctgccacatgtcaggccttatgctaagggtgagtaattccatggtgcactagatatgcagggctgctaatctcaaggagcttccagtgcagagggaataaatgctagactaaaatacagagtcttccaggtgggcatttcaaccaactcagtcaaggaacccatgacaaagaaagtcatttcaactcttacctcatcaagttgaataaagacagagaaaacagaaagagacattgttcttttcctgagtcttttgaatggaaattgtattatgttatagccatcataaaaccattttggtagttttgactgaactgggtgttcactttttcctttttgattgaatacaatttaaattctacttgatgactgcagtcgtcaaggggctcctgatgcaagatgccccttccattttaagtctgtctccttacagaggttaaagtctagtggctaattcctaaggaaacctgattaacacatgctcacaaccatcctggtcattctcgagcatgttctattttttaactaatcacccctgatatatttttatttttatatatccagttttcatttttttacgtcttgcctataagctaatatcataaataaggttgtttaagacgtgcttcaaatatccatattaaccactatttttcaaggaagtatggaaaagtacactctgtcactttgtcactcgatgtcattccaaagttattgcctactaagtaatgactgtcatgaaagcagcattgaaataatttgtttaaagggggcactcttttaaacgggaagaaaatttccgcttcctggtcttatcatggacaatttgggctagaggcaggaaggaagtgggatgacctcaggaggtcaccttttcttgattccagaaacatatgggctgataaacccggggtgacctcatgaaatgagttgcagcagaagtttatttttttcagaacaagtgatgtttgatggacctctgaatctctttagggagacacagatggctgggatccctcccctgtacccttctcactgccaggagaactacgtgtgaaggtattcaaggcagggagtatacattgctgtttcctgttgggcaatgctccttgaccacattttgggaagagtggatgttatcattgagaaaacaatgtgtctggaattaatggggttcttataaagaaggttcccagaaaagaatgttcatccagcctcctcagaaacagaacattcaagaaaaggacaatcaggatgtcatcagggaaatgaaaataaaaaccacaatgagatatcaccttataccaggtagaatggctactataaaaaaatgaagtgtcatcaaggatatagagaaattggaacccttcttcactgctggagggaatggaaaatggtgtagccgttatgaaaaacagtacggaggtttctcaaaaattaaaaatagaactgctatatgatccagcaatctcacttctgtatatatacccaaaataattgaaatcagaatttcaagaaaatatttacactcccatgttcattgtggcactcttcacaatcactgtttccaaagttatggaaacaacccaaatttccattgaaaaataaatggacaaagaaaatgtgcatatacgtacaatgggatattattcagcctaaaaaaagggggaatcctgttatttatgacaacatgaataaacccggaggccattatgctatgtaaaatgagcaagtaacagaaagacaaatactgcctgatttcatttatatgaggttctaaaatagtcaaactcatagaagcagagaatagaacagtggttcctagggaaaaggaggaagggagaaatgaggaaatagggagttgtctaattggtataaaattatagtatgcaagatgaattagctctaaagatcagctgtatagcagagttcgtataatgaacaatactgtattatgcacttaacattttgttaagagggtacctctcatgttaagtgttcttaccatatacatatacacaaggaagcttttggaggtgatggatatatttattaccttgattgtggtgatggtttgacaggtatgtgactatgtctaaactcatcaaattgtatacattaaatatatgcagttttataatatc

SEQ ID NO: 45 - DNA, 1602 bp, Homo sapiens
gagctccgtgctgggaggtgggaagggggcttgaccctggggactcaggcagtctggggacagttccaccaggggccggtgcctagaattggtgagggaggcacctcaggggctgggggagaaggagcgagcgctcttcgcccctctctggcacccagcggcgcgcctgctggccggaaaggcagcgagaagtccgttctccctgtcctgcccccggcgacttgcggcccgggtgggagtccgcaggctccgggtccccagcgccgctggccagggcgcgggcaaagtttgcctctccgcgtccagccggttctttcgctcccgcagcgccgcaggtgccgcctgtcctcgccttcctgctgcaatcgccccaccatggactccccgatccagatcttccgcggggagccgggccctacctgcgccccgagcgcctgcctgccccccaacagcagcgcctggtttcccggctgggccgagcccgacagcaacggcagcgccggctcggaggacgcgcagctggagcccgcgcacatctccccggccatcccggtcatcatcacggcggtctactccgtagtgttcgtcgtgggcttggtgggcaactcgctggtcatgttcgtgatcatccgatacacaaagatgaagacagcaaccaacatttacatatttaacctggctttggcagatgctttagttactacaaccatgccctttcagagtacggtctacttgatgaattcctggccttttggggatgtgctgtgcaagatagtaatttccattgattactacaacatgttcaccagcatcttcaccttgaccatgatgagcgtggaccgctacattgccgtgtgccaccccgtgaaggctttggacttccgcacacccttgaaggcaaagatcatcaatatctgcatctggctgctgtcgtcatctgttggcatctctgcaatagtccttggaggcaccaaagtcagggaagacgtcgatgtcattgagtgctccttgcagttcccagatgatgactactcctggtgggacctcttcatgaagatctgcgtcttcatctttgccttcgtgatccctgtcctcatcatcatcgtctgctacaccctgatgatcctgcgtctcaagagcgtccggctcctttctggctcccgagagaaagatcgcaacctgcgtaggatcaccagactggtcctggtggtggtggcagtcttcgtcgtctgctggactcccattcacatattcatcctggtggaggctctggggagcacctcccacagcacagctgctctctccagctattacttctgcatcgccttaggctataccaacagtagcctgaatcccattctctacgcctttcttgatgaaaacttcaagcggtgtttccgggacttctgctttccactgaagatgaggatggagcggcagagcactagcagagtccgaaatacagttcaggatcctgcttacctgagggacatcgatgggatgaataaaccagtatgactagtcgtggagatgtcttcgtacagttcttcgggaagagaggagttcaatgatctaggtttaactcagatcactactgcagtc

SEQ ID NO: 46 - DNA, 5143 bp, Homo sapiens
gccggagccgactcggagcgcgcggcgccggccgggaggagccggagagcggccgggccgggcggtgggggcgccggcctgccccgcgcgccccagggagcggcaggaatgtgacaatcgcgcgcccgcgcaccgaagcactcctcgctcggctcctagggctctcgcccctctgagctgagccgggttccgcccggggctgggatcccatcaccctccacggccgtccgtccaggtagacgcaccctctgaagatggtgactccctcctgagaagctggaccccttggtaaaagacaaggccttctccaagaagaatatgaaagtgttactcagacttatttgtttcatagctctactgatttcttctctggaggctgataaatgcaaggaacgtgaagaaaaaataattttagtgtcatctgcaaatgaaattgatgttcgtccctgtcctcttaacccaaatgaacacaaaggcactataacttggtataaagatgacagcaagacacctgtatctacagaacaagcctccaggattcatcaacacaaagagaaactttggtttgttcctgctaaggtggaggattcaggacattactattgcgtggtaagaaattcatcttactgcctcagaattaaaataagtgcaaaatttgtggagaatgagcctaacttatgttataatgcacaagccatatttaagcagaaactacccgttgcaggagacggaggacttgtgtgcccttatatggagttttttaaaaatgaaaataatgagttacctaaattacagtggtataaggattgcaaacctctacttcttgacaatatacactttagtggagtcaaagataggctcatcgtgatgaatgtggctgaaaagcatagagggaactatacttgtcatgcatcctacacatacttgggcaagcaatatcctattacccgggtaatagaatttattactctagaggaaaacaaacccacaaggcctgtgattgtgagcccagctaatgagacaatggaagtagacttgggatcccagatacaattgatctgtaatgtcaccggccagttgagtgacattgcttactggaagtggaatgggtcagtaattgatgaagatgacccagtgctaggggaagactattacagtgtggaaaatcctgcaaacaaaagaaggagtaccctcatcacagtgcttaatatatcggaaattgaaagtagattttataaacatccatttacctgttttgccaagaatacacatggtatagatgcagcatatatccagttaatatatccagtcactaatttccagaagcacatgattggtatatgtgtcacgttgacagtcataattgtgtgttctgttttcatctataaaatcttcaagattgacattgtgctttggtacagggattcctgctatgattttctcccaataaaagcttcagatggaaagacctatgacgcatatatactgtatccaaagactgttggggaagggtctacctctgactgtgatatttttgtgtttaaagtcttgcctgaggtcttggaaaaacagtgtggatataagctgttcatttatggaagggatgactacgttggggaagacattgttgaggtcattaatgaaaacgtaaagaaaagcagaagactgattatcattttagtcagagaaacatcaggcttcagctggctgggtggttcatctgaagagcaaatagccatgtataatgctcttgttcaggatggaattaaagttgtcctgcttgagctggagaaaatccaagactatgagaaaatgccagaatcgattaaattcattaagcagaaacatggggctatccgctggtcaggggactttacacagggaccacagtctgcaaagacaaggttctggaagaatgtcaggtaccacatgccagtccagcgacggtcaccttcatctaaacaccagttactgtcaccagccactaaggagaaactgcaaagagaggctcacgtgcctctcgggtagcatggagaagttgccaagagttctttaggtgcctcctgtcttatggcgttgcaggccaggttatgcctcatgctgacttgcagagttcatggaatgtaactatatcatcctttatccctgaggtcacctggaatcagattattaagggaataagccatgacgtcaatagcagcccagggcacttcagagtagagggcttgggaagatcttttaaaaaggcagtaggcccggtgtggtggctcacgcctataatcccagcactttgggaggctgaagtgggtggatcaccagaggtcaggagttcgagaccagcccagccaacatggcaaaaccccatctctactaaaaatacaaaaatgagctaggcatggtggcacacgcctgtaatcccagctacacctgaggctgaggcaggagaattgcttgaaccggggagacggaggttgcagtgagccgagtttgggccactgcactctagcctggcaacagagcaagactccgtctcaaaaaaagggcaataaatgccctctctgaatgtttgaactgccaagaaaaggcatggagacagcgaactagaagaaagggcaagaaggaaatagccaccgtctacagatggcttagttaagtcatccacagcccaagggcggggctatgccttgtctggggaccctgtagagtcactgaccctggagcggctctcctgagaggtgctgcaggcaaagtgagactgacacctcactgaggaagggagacatattcttggagaactttccatctgcttgtattttccatacacatccccagccagaagttagtgtccgaagaccgaattttattttacagagcttgaaaactcacttcaatgaacaaagggattctccaggattccaaagttttgaagtcatcttagctttccacaggagggagagaacttaaaaaagcaacagtagcagggaattgatccacttcttaatgctttcctccctggcatgaccatcctgtcctttgttattatcctgcattttacgtctttggaggaacagctccctagtggcttcctccgtctgcaatgtcccttgcacagcccacacatgaaccatccttcccatgatgccgctcttctgtcatcccgctcctgctgaaacacctcccaggggctccacctgttcaggagctgaagcccatgctttcccaccagcatgtcactcccagaccacctccctgccctgtcctccagcttcccctcgctgtcctgctgtgtgaattcccaggttggcctggtggccatgtcgcctgcccccagcactcctctgtctctgctcttgcctgcacccttcctcctcctttgcctaggaggccttctcgcattttctctagctgatcagaattttaccaaaattcagaacatcctccaattccacagtctctgggagactttccctaagaggcgacttcctctccagccttctctctctggtcaggcccactgcagagatggtggtgagcacatctgggaggctggtctccctccagctggaattgctgctctctgagggagaggctgtggtggctgtctctgtccctcactgccttccaggagcaatttgcacatgtaacatagatttatgtaatgctttatgtttaaaaacattccccaattatcttatttaatttttgcaattattctaattttatatatagagaaagtgacctattttttaaaaaaatcacactctaagttctattgaacctaggacttgagcctccatttctggcttctagtctggtgttctgagtacttgatttcaggtcaataacggtcccccctcactccacactggcacgtttgtgagaagaaatgacattttgctaggaagtgaccgagtctaggaatgcttttattcaagacaccaaattccaaacttctaaatgttggaattttcaaaaattgtgtttagattttatgaaaaactcttctactttcatctattctttccctagaggcaaacatttcttaaaatgtttcattttcattaaaaatgaaagccaaatttatatgccaccgattgcaggacacaagcacagttttaagagttgtatgaacatggagaggacttttggtttttatatttctcgtatttaatatgggtgaacaccaacttttatttggaataataattttcctcctaaacaaaaacacattgagtttaagtctctgactcttgcctttccacctgctttctcctgggcccgctttgcctgcttgaaggaacagtgctgttctggagctgctgttccaacagacagggcctagctttcatttgacacacagactacagccagaagcccatggagcagggatgtcacgtcttgaaaagcctattagatgttttacaaatttaattttgcagattattttagtctgtcatccagaaaatgtgtcagcatgcatagtgctaagaaagcaagccaatttggaaacttaggttagtgacaaaattggccagagagtgggggtgatgatgaccaagaattacaagtagaatggcagctggaatttaaggagggacaagaatcaatggataagcgtgggtggaggaagatccaaacagaaaagtgcaaagttattccccatcttccaagggttgaattctggaggaagaagacacattcctagttccccgtgaacttcctttgacttattgtccccactaaaacaaaacaaaaaacttttaatgccttccacattaattagattttcttgcagtttttttatggcatttttttaaagatgccctaagtgttgaagaagagtttgcaaatgcaacaaaatatttaattaccggttgttaaaactggtttagcacaatttatattttccctctcttgcctttcttatttgcaataaaaggtattgagccattttttaaatgacatttttgataaattatgtttgtactagttgatgaaggagttttttttaacctgtttatataattttgcagcagaagccaaattttttgtatattaaagcaccaaattcatgtacagcatgcatcacggatcaatagactgtacttattttccaataaaattttcaaactttgtactgtta

SEQ ID NO: 47 - DNA, 2306 bp, Homo sapiens
agagactggatggacccacaagggtgacagcccaggcggaccgatcttcccatcccacatcctccggcgcgatgccaaaaagaggctgacggcaactgggccttctgcagagaaagacctccgcttcactgccccggctggtcccaagggtcaggaagatggattcatacctgctgatgtggggactgctcacgttcatcatggtgcctggctgccaggcagagctctgtgacgatgacccgccagagatcccacacgccacattcaaagccatggcctacaaggaaggaaccatgttgaactgtgaatgcaagagaggtttccgcagaataaaaagcgggtcactctatatgctctgtacaggaaactctagccactcgtcctgggacaaccaatgtcaatgcacaagctctgccactcggaacacaacgaaacaagtgacacctcaacctgaagaacagaaagaaaggaaaaccacagaaatgcaaagtccaatgcagccagtggaccaagcgagccttccaggtcactgcagggaacctccaccatgggaaaatgaagccacagagagaatttatcatttcgtggtggggcagatggtttattatcagtgcgtccagggatacagggctctacacagaggtcctgctgagagcgtctgcaaaatgacccacgggaagacaaggtggacccagccccagctcatatgcacaggtgaaatggagaccagtcagtttccaggtgaagagaagcctcaggcaagccccgaaggccgtcctgagagtgagacttcctgcctcgtcacaacaacagattttcaaatacagacagaaatggctgcaaccatggagacgtccatatttacaacagagtaccaggtagcagtggccggctgtgttttcctgctgatcagcgtcctcctcctgagtgggctcacctggcagcggagacagaggaagagtagaagaacaatctagaaaaccaaaagaacaagaatttcttggtaagaagccgggaacagacaacagaagtcatgaagcccaagtgaaatcaaaggtgctaaatggtcgcccaggagacatccgttgtgcttgcctgcgttttggaagctctgaagtcacatcacaggacacggggcagtggcaaccttgtctctatgccagctcagtcccatcagagagcgagcgctacccacttctaaatagcaatttcgccgttgaagaggaagggcaaaaccactagaactctccatcttattttcatgtatatgtgttcattaaagcatgaatggtatggaactctctccaccctatatgtagtataaagaaaagtaggtttacattcatctcattccaacttcccagttcaggagtcccaaggaaagccccagcactaacgtaaatacacaacacacacactctaccctatacaactggacattgtctgcgtggttcctttctcagccgcttctgactgctgattctcccgttcacgttgcctaataaacatccttcaagaactctgggctgctacccagaaatcattttacccttggctcaatcctctaagctaacccccttctactgagccttcagtcttgaatttctaaaaaacagaggccatggcagaataatctttgggtaacttcaaaacggggcagccaaacccatgaggcaatgtcaggaacagaaggatgaatgaggtcccaggcagagaatcatacttagcaaagttttacctgtgcgttactaattggcctctttaagagttagtttctttgggattgctatgaatgataccctgaatttggcctgcactaatttgatgtttacaggtggacacacaaggtgcaaatcaatgcgtacgtttcctgagaagtgtctaaaaacaccaaaaagggatccgtacattcaatgtttatgcaaggaaggaaagaaagaaggaagtgaagagggagaagggatggaggtcacactggtagaacgtaaccacggaaaagagcgcatcaggcctggcacggtggctcaggcctataaccccagctccctaggagaccaaggcgggagcatctcttgaggccaggagtttgagaccagcctgggcagcatagcaagacacatccctacaaaaaattagaaattggctggatgtggtggcatacgcctgtagtcctagccactcaggaggctgaggcaggaggattgcttgagcccaggagttcgaggctgcagtcagtcatgatggcaccactgcactccagcctgggcaacagagcaagatcctgtctttaaggaaaaaaagacaag

SEQ ID NO: 48 - DNA, 4036 bp, Homo sapiens
gcagccagagctcagcagggccctggagagatggccacggtcccagcaccggggaggactggagagcgcgcgctgccaccgccccatgtctcagccagggcttccttcctcggctccaccctgtggatgtaatggcggcccctgctctgtcctggcgtctgcccctcctcatcctcctcctgcccctggctacctcttgggcatctgcagcggtgaatggcacttcccagttcacatgcttctacaactcgagagccaacatctcctgtgtctggagccaagatggggctctgcaggacacttcctgccaagtccatgcctggccggacagacggcggtggaaccaaacctgtgagctgctccccgtgagtcaagcatcctgggcctgcaacctgatcctcggagccccagattctcagaaactgaccacagttgacatcgtcaccctgagggtgctgtgccgtgagggggtgcgatggagggtgatggccatccaggacttcaagccctttgagaaccttcgcctgatggcccccatctccctccaagttgtccacgtggagacccacagatgcaacataagctgggaaatctcccaagcctcccactactttgaaagacacctggagttcgaggcccggacgctgtccccaggccacacctgggaggaggcccccctgctgactctcaagcagaagcaggaatggatctgcctggagacgctcaccccagacacccagtatgagtttcaggtgcgggtcaagcctctgcaaggcgagttcacgacctggagcccctggagccagcccctggccttcaggacaaagcctgcagcccttgggaaggacaccattccgtggctcggccacctcctcgtgggcctcagcggggcttttggcttcatcatcttagtgtacttgctgatcaactgcaggaacaccgggccatggctgaagaaggtcctgaagtgtaacaccccagacccctcgaagttcttttcccagctgagctcagagcatggaggagacgtccagaagtggctctcttcgcccttcccctcatcgtccttcagccctggcggcctggcacctgagatctcgccactagaagtgctggagagggacaaggtgacgcagctgctcctgcagcaggacaaggtgcctgagcccgcatccttaagcagcaaccactcgctgaccagctgcttcaccaaccagggttacttcttcttccacctcccggatgccttggagatagaggcctgccaggtgtactttacttacgacccctactcagaggaagaccctgatgagggtgtggccggggcacccacagggtcttccccccaacccctgcagcctctgtcaggggaggacgacgcctactgcaccttcccctccagggatgacctgctgctcttctcccccagtctcctcggtggccccagccccccaagcactgcccctgggggcagtggggccggtgaagagaggatgcccccttctttgcaagaaagagtccccagagactgggacccccagcccctggggcctcccaccccaggagtcccagacctggtggattttcagccaccccctgagctggtgctgcgagaggctggggaggaggtccctgacgctggccccagggagggagtcagtttcccctggtccaggcctcctgggcagggggagttcagggcccttaatgctcgcctgcccctgaacactgatgcctacttgtccctccaagaactccagggtcaggacccaactcacttggtgtagacagatggccagggtgggaggcaggcagctgcctgctctgcgccgagcctcagaaggaccctgttgagggtcctcagtccactgctgaggacactcagtgtccagttgcagctggacttctccacccggatggcccccacccagtcctgcacacttggtccatccatttccaaacctccactgctgctcccgggtcctgctgcccgagccaggaactgtgtgtgttgcaggggggcagtaactccccaactccctcgttaatcacaggatcccacgaatttaggctcagaagcatcgctcctctccagccctgcagctattcaccaatatcagtcctcgcggctctccagggctccctgccctgacctcttccctgggttttctgccccagcctcctccttccctcccctccccgtccacagggcagcctgagcgtgctttccaaaacccaaatatggccacgctccccctcggttcaaaaccttgcacaggtcccactgccctcagccccacttctcagcctggtacttgtacctccggtgtcgtgtggggacatccccttctgcaatcctccctaccgtcctcctgagccactcagagctccctcacaccccctctgttgcacatgctattccctggggctgctgtgcgctccccctcatctaggtgacaaacttccctgactcttcaagtgccggttttgcttctcctggagggaagcactgcctcccttaatctgccagaaacttctagcgtcagtgctggagggagaagctgtcagggacccagggcgcctggagaaagaggccctgttactattcctttgggatctctgaggcctcagagtgcttggctgctgtatctttaatgctggggcccaagtaagggcacagatccccccacaaagtggatgcctgctgcatcttcccacagtggcttcacagacccacaagagaagctgatggggagtaaaccctggagtccgaggcccaggcagcagccccgcctagtggtgggccctgatgctgccaggcctgggacctcccactgccccctccactggaggggtctcctctgcagctcagggactggcacactggcctccagaagggcagctccacagggcagggcctcattatttttcactgccccagacacagtgcccaacaccccgtcgtataccctggatgaacgaattaattacctggcaccacctcgtctgggctccctgcgcctgacattcacacagagaggcagagtcccgtgcccattaggtctggcatgccccctcctgcaaggggctcaaccccctaccccgacccctccacgtatctttcctaggcagatcacgttgcaatggctcaaacaacattccaccccagcaggacagtgaccccagtcccagctaactctgacctgggagccctcaggcacctgcacttacaggccttgctcacagctgattgggcacctgaccacacgcccccacaggctctgaccagcagcctatgagggggtttggcaccaagctctgtccaatcaggtaggctgggcctgaactagccaatcagatcaactctgtcttgggcgtttgaactcagggagggaggcccttgggagcaggtgcttgtggacaaggctccacaagcgttgagccttggaaaggtagacaagcgttgagccactaagcagaggaccttgggttcccaatacaaaaatacctactgctgagagggctgctgaccatttggtcaggattcctgttgcctttatatccaaaataaactcccctttcttgaggttgtctgagtcttgggtctatgccttgaaaaaagctgaattattggacagtctcacctcctgccatagggtcctgaatgtttcagaccacaaggggctccacacctttgctgtgtgttctggggcaacctactaatcctctctgcaagtcggtctccttatccccccaaatggaaattgtatttgccttctccactttgggaggctcccacttcttgggagggttacattttttaagtcttaatcatttgtgacatatgtatctatacatccgtatcttttaatgatccgtgtgtaccatctttgtgattatttccttaatattttttctttaagtcagttcattttcgttgaaatacatttatttaaagaaaaatctttgttactctgtaaatgaaaaaacccattttcgctataaataaaaggtaactgtacaaaataagtacaat

SEQ ID NO: 49 - DNA, 4034 bp, Homo sapiens
gcagccagagctcagcagggccctggagagatggccacggtcccagcaccggggaggactggagagcgcgcgctgccaccgccccatgtctcagccagggcttccttcctcggctccaccctgtggatgtaatggcggcccctgctctgtcctggcgtctgcccctcctcatcctcctcctgcccctggctacctcttgggcatctgcagcggtgaatggcacttcccagttcacatgcttctacaactcgagagccaacatctcctgtgtctggagccaagatggggctctgcaggacacttcctgccaagtccatgcctggccggacagacggcggtggaaccaaacctgtgagctgctccccgtgagtcaagcatcctgggcctgcaacctgatcctcggagccccagattctcagaaactgaccacagttgacatcgtcaccctgagggtgctgtgccgtgagggggtgcgatggagggtgatggccatccaggacttcaagccctttgagaaccttcgcctgatggcccccatctccctccaagttgtccacgtggagacccacagatgcaacataagctgggaaatctcccaagcctcccactactttgaaagacacctggagttcgaggcccggacgctgtccccaggccacacctgggaggaggcccccctgctgactctcaagcagaagcaggaatggatctgcctggagacgctcaccccagacacccagtatgagtttcaggtgcgggtcaagcctctgcaaggcgagttcacgacctggagcccctggagccagcccctggccttcaggacaaagcctgcagcccttgggaaggacaccattccgtggctcggccacctcctcgtgggcctcagcggggcttttggcttcatcatcttagtgtacttgctgatcaactgcaggaacaccgggccatggctgaagaaggtcctgaagtgtaacaccccagacccctcgaagttcttttcccagctgagctcagagcatggaggagacgtccagaagtggctctcttcgcccttcccctcatcgtccttcagccctggcggcctggcacctgagatctcgccactagaagtgctggagagggacaaggtgacgcagctgctcctgcagcaggacaaggtgcctgagcccgcatccttaagcagcaaccactcgctgaccagctgcttcaccaaccagggttacttcttcttccacctcccggatgccttggagatagaggcctgccaggtgtactttacttacgacccctactcagaggaagaccctgatgagggtgtggccggggcacccacagggtcttccccccaacccctgcagcctctgtcaggggaggacgacgcctactgcaccttcccctccagggatgacctgctgctcttctcccccagtctcctcggtggccccagccccccaagcactgcccctgggggcagtggggccggtgaagagaggatgcccccttctttgcaagaaagagtccccagagactgggacccccagcccctggggcctcccaccccaggagtcccagacctggtggattttcagccaccccctgagctggtgctgcgagaggctggggaggaggtccctgacgctggccccagggagggagtcagtttcccctggtccaggcctcctgggcagggggagttcagggcccttaatgctcgcctgcccctgaacactgatgcctacttgtccctccaagaactccagggtcaggacccaactcacttggtgtagacagatggccagggtgggaggcaggcagctgcctgctctgcgccgagcctcagaaggaccctgttgagggtcctcagtccactgctgaggacactcagtgtccagttgcagctggacttctccacccggatggcccccacccagtcctgcacacttggtccatccatttccaaacctccactgctgctcccgggtcctgctgcccgagccaggaactgtgtgtgttgcaggggggcagtaactccccaactccctcgttaatcacaggatcccacgaatttaggctcagaagcatcgctcctctccagccctgcagctattcaccaatatcagtcctcgcggctctccagggctccctgccctgacctcttccctgggttttctgccccagcctcctccttccctcccctccccgtccacagggcagcctgagcgtgctttccaaaacccaaatatggccacgctccccctcggttcaaaaccttgcacaggtcccactgccctcagccccacttctcagcctggtacttgtacctccggtgtcgtgtggggacatccccttctgcaatcctccctaccgtcctcccgagccactcagagctccctcacaccccctctgttgcacatgctattccctggggctgctgtgcgctccccctcatctaggtgacaaacttccctgactcttcaagtgccggttttgcttctcctggagggaagcactgcctcccttaatctgccagaaacttctagcgtcagtgctggagggagaagctgtcagggacccagggcgcctggagaaagaggccctgttactattcctttgggatctctgaggcctcagagtgcttggctgctgtatctttaatgctggggcccaagtaagggcacagatccccccacaaagtggatgcctgctgcatcttcccacagtggcttcacagacccacaagagaagctgatggggagtaaaccctggagtccgaggcccaggcagcagccccgcctagtggtgggccctgatgctgccaggcctgggacctcccactgccccctccactggaggggtctcctctgcagctcagggactggcacactggcctccagaagggcagctccacagggcagggcctcattatttttcactgccccagacacagtgcccaacaccccgtcgtataccctggatgaacgaattaattacctggcaccacctcgtctgggctccctgcgcctgacattcacacagagaggcagagtcccgtgcccattaggtctggcatgccccctcctgcaaggggctcaaccccctaccccgacccctccacgtatctttcctaggcagatcacgttgcaatggctcaaacaacattccaccccagcaggacagtgaccccagtcccagctaactctgacctgggagccctcaggcacctgcacttacaggccttgctcacagctgattgggcacctgaccacacgcccccacaggctctgaccagcagcctatgagggggtttggcaccaagctctgtccaatcaggtaggctgggcctgaactagccaatcagatcaactctgtcttgggcgtttgaactcagggagggaggcccttgggagcaggtgcttgtggacaaggctccacaagcgttgagccttggaaaggtagacaagcgttgagccactaagcagaggaccttgggttcccaatacaaaaatacctactgctgagagggctgctgaccatttggtcaggattcctgttgcctttatatccaaaataaactcccctttcttgaggttgtctgagtcttgggtctatgccttgaaaaaagctgaattattggacagtctcacctcctgccatagggtcctgaatgtttcagaccacaaggggctccacacctttgctgtgtgttctggggcaacctactaatcctctctgcaagtcggtctccttatccccccaaatggaaattgtatttgccttctccactttgggaggctcccacttcttgggagggttacattttttaagtcttaatcatttgtgacatatgtatctatacatccgtatcttttaatgatccgtgtgtaccatctttgtgattatttccttaatattttttctttaagtcagttcattttcgttgaaatacatttataaagaaaaatctttgttactctgtaaatgaaaaaacccattttcgctataaataaaaggtaactgtacaaaataagtacaat

SEQ ID NO: 50 - DNA, 1451 bp, Homo sapiens
gaagagcaagcgccatgttgaagccatcattaccattcacatccctcttattcctgcagctgcccctgctgggagtggggctgaacacgacaattctgacgcccaatgggaatgaagacaccacagctgatttcttcctgaccactatgcccactgactccctcagtgtttccactctgcccctcccagaggttcagtgttttgtgttcaatgtcgagtacatgaattgcacttggaacagcagctctgagccccagcctaccaacctcactctgcattattggtacaagaactcggataatgataaagtccagaagtgcagccactatctattctctgaagaaatcacttctggctgtcagttgcaaaaaaaggagatccacctctaccaaacatttgttgttcagctccaggacccacgggaacccaggagacaggccacacagatgctaaaactgcagaatctggtgatcccctgggctccagagaacctaacacttcacaaactgagtgaatcccagctagaactgaactggaacaacagattcttgaaccactgtttggagcacttggtgcagtaccggactgactgggaccacagctggactgaacaatcagtggattatagacataagttctccttgcctagtgtggatgggcagaaacgctacacgtttcgtgttcggagccgctttaacccactctgtggaagtgctcagcattggagtgaatggagccacccaatccactgggggagcaatacttcaaaagagaatcctttcctgtttgcattggaagccgtggttatctctgttggctccatgggattgattatcagccttctctgtgtgtatttctggctggaacggacgatgccccgaattcccaccctgaagaacctagaggatcttgttactgaataccacgggaacttttcggcctggagtggtgtgtctaagggactggctgagagtctgcagccagactacagtgaacgactctgcctcgtcagtgagattcccccaaaaggaggggcccttggggaggggcctggggcctccccatgcaaccagcatagcccctactgggcccccccatgttacaccctaaagcctgaaacctgaaccccaatcctctgacagaagaaccccagggtcctgtagccctaagtggtactaactttccttcattcaacccacctgcgtctcatactcacctcaccccactgtggctgatttggaattttgtgcccccatgtaagcaccccttcatttggcattccccacttgagaattacccttttgccccgaacatgtttttcttctccctcagtctggcccttccttttcgcaggattcttcctccctccctctttccctcccttcctctttccatctaccctccgattgttcctgaaccgatgagaaataaagtttctgttgataatcatc

SEQ ID NO: 51 - DNA, 1533 bp, Homo sapiens
atacctaggcactaatttagttccatatgtactatgtgtacctgaaaagttgtgtggcaatcaaattttcacaaatagaatcctgttttaaatacactaagaaagtacctactttatcctttaaacaagaggtcagcagactttttctacaaagggtcagatagtaaagattttacaccttttgtacaatacaatctctatctcatctacttagctctgccattgttgcataaaagcagctgtagatgatacacaaatgggtgaggctgtattccaaatgaaacgttatttgcaaaaacaggtggtagattaaatttggtcccaaggcttacttgggaaaaaaaaagatcttttgaaaaagaaaaaataaatgaataatttttttaaaaaattgttccctaggtcatagtttgccagcccctgccctaaacaaataattcttgaatgcctactgtggtgtgtaagatatgagtaaataccagggatacacagagaacaaaagagaaaaactgctattcttgtgaaacttggaagttggaggtaagctatttaaaataaacccacaataaagtacttcacatagtgcagactgtttctttaaatcaaaactcactccaaacaaccaattgattcactttgtaagtttgaatttttgtcttcagattcttttaaagtgggcccttagtcaggagcggtggctcatgcctgtagtcctagcactttgggaggctgaggcaggcagatcacttgaggtcaggagttcgagacaagcctggccaacatggcgaaaccccgtctccactgaaaacacaaaaattaggctggcatagtggcatttgcctgtagtcctagctactcaggaggctgaggcaggagaattgcttgaacctgggaggtgaaaattgcagtgagccgagatcatgctattgtactccagcctgggcaacaaagcaagactcgtctcaaaaaaataaaaattaaaaaaataaagtagcctctagcctaagatagcttgagcctaggtgtgaatctactgccttactctgatgtaagcacagtaagtgtgggggctgcagggaatatccaggaggaacaataatttcagaggctctgtctcttcatgtccttgacctctgcttacagcagcaatacttttactcagacttcctgtttctggaacttgccttcttttttgctgtgtttatacttcccttgtctgtggttagataagtataaagccctagatctaagcttctctgtcttcctccctccctcccttcctcttactctcattcatttcatacacactggctcacacatctactctctctctctatctctctcagaatgacaattctaggtacaacttttggcatggttttttctttacttcaagtcgtttctggagaaagtggctatgctcaaaatggtgagtcatttctaacttttcttatggattttggattatctgtagcatggtttcaggttattcagttccctaagagacctgagtcaggcactgggtttgagtgc

SEQ ID NO: 52 - DNA, 3191 bp, Homo sapiens
acagagctggtttgggtctccctctctctcattcactggcacatacaagcgtgcttcttctctattctttctctctctctctctctctctctctctctctctctctctctctcagaatgatggctctgggtagagctttcgctatagttttctgcttaattcaagctgtttctggagaaagtggaaatgcccaggatggagacctagaagatgcagacgcggacgatcactccttctggtgccacagccagttggaagtggatggaagtcaacatttattgacttgtgcttttaatgactcagacatcaacacagctaatctggaatttcaaatatgtggggctcttttacgagtgaaatgcctaactcttaacaagctgcaagatatatattttataaagacatcagaattcttactgattggtagcagcaatatatgtgtgaagcttggacaaaagaatttaacttgcaaaaatatggctataaacacaatagttaaagccgaggctccctctgacctgaaagtcgtttatcgcaaagaagcaaatgattttttggtgacatttaatgcacctcacttgaaaaagaaatatttaaaaaaagtaaagcatgatgtggcctaccgcccagcaaggggtgaaagcaactggacgcatgtatctttattccacacaagaacaacaatcccacagagaaaactacgaccaaaagcaatgtatgaaatcaaagtccgatccattccccataacgattacttcaaaggcttctggagcgagtggagtccaagttctaccttcgaaactccagaacccaagaatcaaggaggatgggatcctgtcttgccaagtgtcaccattctgagtttgttctctgtgtttttgttggtcatcttagcccatgtgctatggaaaaaaaggattaaacctgtcgtatggcctagtctccccgatcataagaaaactctggaacaactatgtaagaagccaaaaacgagtctgaatgtgagtttcaatcccgaaagtttcctggactgccagattcatgaggtgaaaggcgttgaagccagggacgaggtggaaagttttctgcccaatgatcttcctgcacagccagaggagttggagacacagggacacagagccgctgtacacagtgcaaaccgctcgcctgagacttcagtcagcccaccagaaacagttagaagagagtcacccttaagatgcctggctagaaatctgagtacctgcaatgcccctccactcctttcctctaggtcccctgactacagagatggtgacagaaataggcctcctgtgtatcaagacttgctgccaaactctggaaacacaaatgtccctgtccctgtccctcaaccattgcctttccagtcgggaatcctgataccagtttctcagagacagcccatctccacttcctcagtactgaatcaagaagaagcgtatgtcaccatgtctagtttttaccaaaacaaatgaattataagaaaacccttccatcgacaaccaaatgatcactgagatggaaagtctggaatgcttgctctcccccgtagctcacagaagagaaagtcaacgtgaccttgctacacatcttcagcattctaagaaatcattttgctcttctagctcagaagcatttgcacaaagcaggaagaatctgttttccctgttgttggattagtcataagagtccatatgacccaattaaaattgcaaaactcagttaaccgaagaaagaaagatagacaaaagaagatagaaggatgtggtgaatgcaggaagaagaaaatgaaagatgtgagtggtgggtctatcattcaaattgactatttatccagcactataccactcttctcatttcttcctcacaataatattacaatgtgggcttatccattataacttttattttctttgtcatagatgctgaagttgaaagtagagattttaagtgatatccaaatttttctttcagctacagatgaggcacacattccaacttcaaccctctcttgccatgaacctgtcctattgttgagtgtcaaacatcaccactaagtggatggttatgtagtccattatccaaactgagtcgttttggaaagaaaaagttagacataattaacagtaagcataaatgtatatgtctaagagagatgtggatggatggtcattttacttaaagtggctatagggatgaacatgaaggacaaagtacatttatgggtgtggcataccatgaccatgtgtcaaaggaagtgggaaaaagaaaaaaaaagcaccaagatcatttgattttgttttgttgttttgtttgaaaacaaactcaagaagcaatgagttagaagccgagaagttccagagtcagttatcaagaccatgattttcctgctgctattatccattggcttctctgtgacattgtaggaggaactatggccaatctacaggagttcaacatttaacagtgaatggagtcctcctatgtgagtcctcctatgtgtggagacaccattaagaactaccccaagttctacatctctggatattgcctgaactacagaaaaagggggctgcgcacaccacaatgagtgccctacctgaaactatgctcacagaaacacaaagaagatgggtaagttattcaaattcaaatgttgatttatgactgcaagtcacaattttgaatccctgctgtgtataaccaatctcctgaagaaaacaacaaataactgaaagatactgtggttgggtgccttagcattaaaattctgtttaagtgttgacattgtttatttggattggagtgtctgtccggtcatgtattgtatccatgcattatattcagataaccacaacagctgctaatgcttgattatattctcagggactgcatgcaatgtaacattactggttggttctgccaattttcctcttggtatttataaaggaaaaccaaaactcttggtcagagacaatatgcaaaacagagatgtcaagtactatgtccaaatactgtgaaatataatgagaaataggtaacaaatttatcaatcaactatgtttggatccagggaatctcaagttattcaattcattctctgtaagcctttgtctctctcttcatccagacttttgccttcaaatacaagcatgcgctattttctggaa

SEQ ID NO: 53 - DNA, 1933 bp, Homo sapiens
cctggccggtgcttcagttagatcaaaccattgctgaaactgaagaggacatgtcaaatattacagatccacagatgtgggattttgatgatctaaatttcactggcatgccacctgcagatgaagattacagcccctgtatgctagaaactgagacactcaacaagtatgttgtgatcatcgcctatgccctagtgttcctgctgagcctgctgggaaactccctggtgatgctggtcatcttatacagcagggtcggccgctccgtcactgatgtctacctgctgaacctggccttggccgacctactctttgccctgaccttgcccatctgggccgcctccaaggtgaatggctggatttttggcacattcctgtgcaaggtggtctcactcctgaaggaagtcaacttctacagtggcatcctgctgttggcctgcatcagtgtggaccgttacctggccattgtccatgccacacgcacactgacccagaagcgtcacttggtcaagtttgtttgtcttggctgctggggactgtctatgaatctgtccctgcccttcttccttttccgccaggcttaccatccaaacaattccagtccagtttgctatgaggtcctgggaaatgacacagcaaaatggcggatggtgttgcggatcctgcctcacacctttggcttcatcgtgccgctgtttgtcatgctgttctgctatggattcaccctgcgtacactgtttaaggcccacatggggcagaagcaccgagccatgagggtcatctttgctgtcgtcctcatcttcctgctttgctggctgccctacaacctggtcctgctggcagacaccctcatgaggacccaggtgatccaggagagctgtgagcgccgcaacaacatcggccgggccctggatgccactgagattctgggatttctccatagctgcctcaaccccatcatctacgccttcatcggccaaaattttcgccatggattcctcaagatcctggctatgcatggcctggtcagcaaggagttcttggcacgtcatcgtgttacctcctacacttcttcgtctgtcaatgtctcttccaacctctgaaaaccatcgatgaaggaatatctcttctcagaaggaaagaataaccaacaccctgaggttgtgtgtggaaggtgatctggctctggacaggcactatctgggttttggggggacgctataggatgtggggaagttaggaactggtgtcttcaggggccacaccaaccttctgaggagctgttgaggtacctccaaggaccggcctttgcacctccatggaaacgaagcaccatcattcccgttgaacgtcacatctttaacccactaactggctaattagcatggccacatctgagccccgaatctgacattagatgagagaacagggctgaagctgtgtcctcatgagggctggatgctctcgttgaccctcacaggagcatctcctcaactctgagtgttaagcgttgagccaccaagctggtggctctgtgtgctctgatccgagctcaggggggtggttttcccatctcaggtgtgttgcagtgtctgctggagacattgaggcaggcactgccaaaacatcaacctgccagctggccttgtgaggagctggaaacacatgttccccttgggggtggtggatgaacaaagagaaagagggtttggaagccagatctatgccacaagaaccccctttacccccatgaccaacatcgcagacacatgtgctggccacctgctgagccccaagtggaacgagacaagcagcccttagcccttcccctctgcagcttccaggctggcgtgcagcatcagcatccctagaaagccatgtgcagccaccagtccattgggcaggcagatgttcctaataaagcttctgttcc

SEQ ID NO: 54 - DNA, 2859 bp, Homo sapiens
cattcagagacagaaggtggatagacaaatctccaccttcagactggtaggctcctccagaagccatcagacaggaagatgtgaaaatccccagcactcatcccagaatcactaagtggcacctgtcctgggccaaagtcccaggacagacctcattgttcctctgtgggaatacctccccaggagggcatcctggatttcccccttgcaacccaggtcagaagtttcatcgtcaaggttgtttcatcttttttttcctgtctaacagctctgactaccacccaaccttgaggcacagtgaagacatcggtggccactccaataacagcaggtcacagctgctcttctggaggtgtcctacaggtgaaaagcccagcgacccagtcaggatttaagtttacctcaaaaatggaagattttaacatggagagtgacagctttgaagatttctggaaaggtgaagatcttagtaattacagttacagctctaccctgcccccttttctactagatgccgccccatgtgaaccagaatccctggaaatcaacaagtattttgtggtcattatctatgccctggtattcctgctgagcctgctgggaaactccctcgtgatgctggtcatcttatacagcagggtcggccgctccgtcactgatgtctacctgctgaacctagccttggccgacctactctttgccctgaccttgcccatctgggccgcctccaaggtgaatggctggatttttggcacattcctgtgcaaggtggtctcactcctgaaggaagtcaacttctatagtggcatcctgctactggcctgcatcagtgtggaccgttacctggccattgtccatgccacacgcacactgacccagaagcgctacttggtcaaattcatatgtctcagcatctggggtctgtccttgctcctggccctgcctgtcttacttttccgaaggaccgtctactcatccaatgttagcccagcctgctatgaggacatgggcaacaatacagcaaactggcggatgctgttacggatcctgccccagtcctttggcttcatcgtgccactgctgatcatgctgttctgctacggattcaccctgcgtacgctgtttaaggcccacatggggcagaagcaccgggccatgcgggtcatctttgctgtcgtcctcatcttcctgctctgctggctgccctacaacctggtcctgctggcagacaccctcatgaggacccaggtgatccaggagacctgtgagcgccgcaatcacatcgaccgggctctggatgccaccgagattctgggcatccttcacagctgcctcaaccccctcatctacgccttcattggccagaagtttcgccatggactcctcaagattctagctatacatggcttgatcagcaaggactccctgcccaaagacagcaggccttcctttgttggctcttcttcagggcacacttccactactctctaagacctcctgcctaagtgcagccccgtggggttcctcccttctcttcacagtcacattccaagcctcatgtccactggttcttcttggtctcagtgtcaatgcagcccccattgtggtcacaggaagtagaggaggccacgttcttactagtttcccttgcatggtttagaaagcttgccctggtgcctcaccccttgccataattactatgtcatttgctggagctctgcccatcctgcccctgagcccatggcactctatgttctaagaagtgaaaatctacactccagtgagacagctctgcatactcattaggatggctagtatcaaaagaaagaaaatcaggctggccaacggggtgaaaccctgtctctactaaaaatacaaaaaaaaaaaaaaattagccgggcgtggtggtgagtgcctgtaatcacagctacttgggaggctgagatgggagaatcacttgaacccgggaggcagaggttgcagtgagccgagattgtgcccctgcactccagcctgagcgacagtgagactctgtctcagtccatgaagatgtagaggagaaactggaactctcgagcgttgctgggggggattgtaaaatggtgtgaccactgcagaagacagtatggcagctttcctcaaaacttcagacatagaattaacacatgatcctgcaattccacttataggaattgacccacaagaaatgaaagcagggacttgaacccatatttgtacaccaatattcatagcagcttattcacaagacccaaaaggcagaagcaacccaaatgttcatcaatgaatgaatgaatggctaagcaaaatgtgatatgtacctaacgaagtatccttcagcctgaaagaggaatgaagtactcatacatgttacaacacggacgaaccttgaaaactttatgctaagtgaaataagccagacatcaacagataaatagtttatgattccacctacatgaggtactgagagtgaacaaatttacagagacagaaagcagaacagtgattaccagggactgaggggaggggagcatgggaagtgacggtttaatgggcacagggtttatgtttaggatgttgaaaaagttctgcagataaacagtagtgatagttgtaccgcaatgtgacttaatgccactaaattgacacttaaaaatggtttaaatggtcaattttgttatgtatattttatatcaatttaaaaaaaaacctgagccccaaaaggtattttaatcaccaaggctgattaaaccaaggctagaaccacctgcctatattttttgttaaatgatttcattcaatatcttttttttaataaaccatttttacttgggtgtttat

SEQ ID NO: 55 - DNA, 2295 bp, Homo sapiens
gaattccaactatggagacccaaatgtctcagaatgtatgtcccagaaacctgtggctgcttcaaccattgacagttttgctgctgctggcttctgcagacagtcaagctgcagctcccccaaaggctgtgctgaaacttgagcccccgtggatcaacgtgctccaggaggactctgtgactctgacatgccagggggctcgcagccctgagagcgactccattcagtggttccacaatgggaatctcattcccacccacacgcagcccagctacaggttcaaggccaacaacaatgacagcggggagtacacgtgccagactggccagaccagcctcagcgaccctgtgcatctgactgtgctttccgaatggctggtgctccagacccctcacctggagttccaggagggagaaaccatcatgctgaggtgccacagctggaaggacaagcctctggtcaaggtcacattcttccagaatggaaaatcccagaaattctcccgtttggatcccaccttctccatcccacaagcaaaccacagtcacagtggtgattaccactgcacaggaaacataggctacacgctgttctcatccaagcctgtgaccatcactgtccaagtgcccagcatgggcagctcttcaccaatggggatcattgtggctgtggtcattgcgactgctgtagcagccattgttgctgctgtagtggccttgatctactgcaggaaaaagcggatttcagccaattccactgatcctgtgaaggctgcccaatttgagccacctggacgtcaaatgattgccatcagaaagagacaacttgaagaaaccaacaatgactatgaaacagctgacggcggctacatgactctgaaccccagggcacctactgacgatgataaaaacatctacctgactcttcctcccaacgaccatgtcaacagtaataactaaagagtaacgttatgccatgtggtcatactctcagcttgctgagtggatgacaaaaagaggggaattgttaaaggaaaatttaaatggagactggaaaaatcctgagcaaacaaaaccacctggcccttagaaatagctttaactttgcttaaactacaaacacaagcaaaacttcacggggtcatactacatacaagcataagcaaaacttaacttggatcatttctggtaaatgcttatgttagaaataagacaaccccagccaatcacaagcagcctactaacatataattaggtgactagggactttctaagaagatacctacccccaaaaaacaattatgtaattgaaaaccaaccgattgcctttattttgcttccacattttcccaataaatacttgcctgtgacattttgccactggaacactaaacttcatgaattgcgcctcagatttttcctttaacatcttttttttttttgacagagtctcaatctgttacccaggctggagtgcagtggtgctatcttggctcactgcaaacccgcctcccaggtttaagcgattctcatgcctcagcctcccagtagctgggattagaggcatgtgccatcatacccagctaatttttgtattttttattttttttttttagtagagacagggtttcgcaatgttggccaggccgatctcgaacttctggcctctagcgatctgcccgcctcggcctcccaaagtgctgggatgaccagcatcagccccaatgtccagcctctttaacatcttctttcctatgccctctctgtggatccctactgctggtttctgccttctccatgctgagaacaaaatcacctattcactgcttatgcagtcggaagctccagaagaacaaagagcccaattaccagaaccacattaagtctccattgttttgccttgggatttgagaagagaattagagaggtgaggatctggtatttcctggactaaattccccttggggaagacgaagggatgctgcagttccaaaagagaaggactcttccagagtcatctacctgagtcccaaagctccctgtcctgaaagccacagacaatatggtcccaaatgactgactgcaccttctgtgcctcagccgttcttgacatcaagaatcttctgttccacatccacacagccaatacaattagtcaaaccactgttattaacagatgtagcaacatgaaagacgctatgttacaggttacatgagagcaatcatgtaagtctatatgacttcagaaatgttaaaatagactaacctctaacaacaaattaaaagtgcggaattc

SEQ ID NO: 56 - DNA, 4863 bp, Homo sapiens
ggatccttctgccttgacctcccaagtgctggaattgcaggcatgagccattgcacccggcttttttttttttttttctttgagacaggcacttgcactgttgcctagactggagtgcagtagcgggattagagttcactgcagcctcaacctcccaagctcaagcgatcctcccaccttacccttcctgaatggatggggccacaggtgtgtaccatcacacgtagttaatttttaaactttttcagagacggggtttctccatgttgcccaggctggtcttgaactcccggcttccagtgatcctcctgcctcagcttcccaaagtgctgggattacaggcatgaaccactgcacccaaccttttttcattcccttaacgaaacctttggatgaacaaaaattcttaatttcagtgaagttcagtttatcgacttcaatttatacattttataaagtttatgaatttttttttttttttttagacggagtcttgctctgtcgcccaggctggagtgcagtggctatacccaggtgtgatcataactcactccagcctcaaactcctgggctcaaggattcctcctgcctcagtctccagagtaggtgggaccacaggcacatccaccacactggctaattttttttatttgtagtggagactacgtcttactgtttgcccaggctggtctccaactcctgggttcaagtgatccacctcattctcccaaagcgctgggattgtaggagtgagccactgcacccagcctgtctgctaatattatgtttaagagttctgaatctttttttaaattttttaaaatttttaattttttattttttttgagacagtcttgctctgtcgcccaggctggagtgcaatggtgcaatcttggctcaatgcaacctccgccttctgggttcaagcgattctcctgccttagcctcctgagtagctgggattacaggtacactccaccatgcctggctaatttttttgtatttttagtagagatgggatttcaccatgttggtcaggctggtctcgacctcctgacctcgtgatcctcctgcctccaccccccaaagcgccaggattctaggtgtgagccaccacacctgtcctgaatctatatttatgagagacattggccttaagctctctttttttttttttttttttttttttgagatggagtctcgctctgtcacccaggctggagtgcagtggcgcaatctcggctcactgcaagctccgcctcccgggttcacgccattctcctgcctcagcctcccaagtggctgggactacaggcgcggccaccacgcccggctaattttttgtatttttagtagagatggggtttcaccgtgttagccgggatagtctcaatctcctgacctcgtgatccgcctgcctcggcctcccaaagtgctgggattacaggcgtgagccaccgcgcctggccaagttctctttcttataatgtgctttgttgtcaagatgatgctgacctcataaaatatgctgggagagtgtttcctctgttttatggcctgaagagttagtgtaggaatagaatcatttctacattggaagaattcactaattgatgtcttctggacctggaattttagtttttggaaagttttaaactatgattaaaaattttaaataggccgggtgtggtgcatcatgcctgtaatcccagcactttgggaggctgaggcaggtagatcacaatgtcaggaatttgagaccagcctggccaatatggtgaaacaccgtctctactaaaaataaaaaaattacccggcatggtggtgcatgcacctgtagtcccagccactcgggaggctgtggaagaagaaactcttgaacccaggaagtgggggttgcagtgagtcgagatcgtgccactgcactccagcctgggtgacagagcgagactcttatctcaaaaacaaaaggctaggcgtggtggctcacacctgtaatcccaacactttggaggcccaggcggatggatcatgaggtcaggagattgagaccatcctggctaagacggtgaaaccccgtctctactaaaaatacaaaaaattagccaagtgtggtggtgggcacctatagtcccagctactcaggaggctgaggcaggagaatggcgtgaacccaggaggcggagcttgcagtgagccgagatcgcgccactgcactccagcctgggagacagagcaagattccatctcaaaaaaaaaaaaaaaatttaaatagttataggactacagacgttttaaatttcctcttgtgtcagtttagaaggttgtatttatcaggaatgtgttcagttcatctaaattttcaaatgtgttgctgtggaatttttcataattatcctctatctttttttttttttctttttttctgagacggggtctcactctgtcgcccaggctggagtgcagtggcacgatcctggctcactgcaacatctgcctcccaggttcaagcaattctcctgcctcagcctcctgagtagctgggactacaggtgcccggctaatttttgtatttttagtagagatggggtttcaccatgttggccagtgtggtctcgaactcctgacctcaggtgatccacccactttggcctcccaaagtgttgcgattacaggcgtgagccaacatgcccagcccaaggaggtgacatcttgaggggacaccttcggggtggacagttgagtctctgtcacctaggaagtgcctccccttttaccactgtattatctgcggttagcacagtgcaaacatggaggcctctttctgtccctatccagccctggctctgggagtggtgggctcgcgacttaggcctgtctgcctgatttcctgcagagcccccctccatgcgcctgaaggcccgacccagcagccctggcttttccgtgcttacctgcagcgccttctccttctaccctccggagctgcaacttcggttcctgcggaatgggctggccgctggcaccggccagggtgacttcggccccaacagtgacggatccttccacgcctcgtcgtcactaacagtcaaaagtggcgatgagcaccactactgctgcattgtgcagcacgcggggctggcgcagcccctcagggtggagctgggtgaggtcccgccaggtggtgatgctcctggtttcccgttgccttgtctcactgctgcgccggtccttcctgagtctgaccttcctccccactgctgccacctccttgaatctgactgccttgaacctcacgcctgtcagtgcccccaaaacctgatggcttgtccttcccaaggccaactgccttccgtctcctgctgcttctggcctcactgagtctgaagagctgttaactaccatggccagtcctccctgagtctgaccatcttccatcctgctgctgctgctgctgctgctgcgggtcttcctggaatctgaccattcgttgtctgctatgcccgtacctcaccaagactgactgcctgctgctttgctactgcccgggcccatgagactgacttcccactgctctgcctgcctctccccactgcactggcacagcccgccttgccgctgctgatccattgccggtgtgaccgcggccgctcgtgctgtagctggttcttacgtccaacctgggggcagtctgccagatcgcctgcctggcctcgcctctgcccatcagacacttggtgctggaatctccgaggctgggagggactgggagcgccccagttctgtgtcctgactgggtggggtggaggggctgctccacatctcacagcgttctctggctgcagaatctccagccaagtcctccgtgctcgtggtgggaatcgtcatcggtgtcttgctactcacggcagcggctgtaggaggagctctgttgtggagaaggatgaggagtgggctgccaggtggggggcagcgggaggaagagcctctgagagagggacagagaccccaagagaggggcacacagacctgggaggacagagacccagagaggggggacagagatcagagagaggtggagacagaaacccagagatgggagaacagaggtgcagagagagggggacggagacagagacccagagacgggggaacagagacccagagggacagagagaggtgcggacagagggagggggagacagacccagaggagggaggcaaagatgtagaaagaggggggacggaaaattgggagaaggggagacaaaggcccagaaggaaggggatagagactgaggaagagtgtgtgagacacacacacaaatgggggacgccagtcagacccagagcgcctcagagattctgatgacctctccctctctctctctcctcagccccttggatctcccttcgtggagacgacaccggggtcctcctgcccaccccaggggaggcccaggatgctgatttgaaggatgtaaatgtgattccagccaccgcctgaccatccgccattccgactgctaaaagcgaatgtagtcaggcccctttcatgctgtgagacctcctggaacactggcatctctgagcctccagaaggggttctgggcctagttgtcctccctctggagccccgtcctgtggtctgcctcagtttcccctcctaatacatatggctgttttccacctcgataatataacacgagtttgggcccgaatcagtgtgttctcatcatttttcaggcaggggaggtaagggaataagtcgggggactgaatggcggctgggcctcggatctctcctacaggtaacatgctgccacaggggaacctgccagttttatacatcaggtcatgtat

SEQ ID NO: 57 - DNA, 1416 bp, Homo sapiens
gtgactgctgtgctctgggcgccacgtcgctccagggagtgatgggaatcctgtcattcttacctgtccttgccactgagagtgactgggctgactgcaagtccccccagccttggggtcatatgcttctgtggacagctgtgctattcctggctcctgttgctgggacacctgcagctcccccaaaggctgtgctgaaactcgagccccagtggatcaacgtgctccaggaggactctgtgactctgacatgccgggggactcagagccctgagagcgactccattcagtggttccacaatgggaatctcattcccacccacacgcagcccagctacaggttcaaggccaacaacaatgacagcggggagtacacgtgccagactggccagaccagcgtgagcgaccctgtgcatctgactgtgctttctgagtggctggtgctccagacccctcacctggagttccaggagggagaaaccatcgtgctgaggtgccacagctggaaggacaagcctctggtcaaggtcacattcttccagaatggaaaatccaagaaattttcccgttcggatcccaacttctccatcccacaagcaaaccacagtcacagtggtgattaccactgcacaggaaacataggctacacgctgtactcatccaagcctgtgaccatcactgtccaagctcccagctcttcaccgatggggatcattgtggctgtggtcactgggactgctgtagcggccattgttgctgctgtagtggccttgatctactgcaggaaaaagcggatttcagccaatcccactaatcctgatgaggctgacaaagttggggctgagaacacaatcacctattcacttctcatgcacccggatgctctggaagagcctgatgaccagaaccgtatttagtctccattgtcttgcattgggatttgagaagaaatcagagagggaagatctggtatttcctggcctaaattccccttggggaggacagggagatgctgcagttccaaaagagaaggtttcttccagagtcatctacctgagtcctgaagctccctgtcctgaaagccacagacaatatggtcccaaatgcccgactgcaccttctgtgcttcagctcttcttgacatcaaggctcttccgttccacatccacacagccaatccaattaatcaaaccactgttattaacagataatagcaacttgggaaatgcttatgttacaggttacgtgagaacaatcatgtaaatctatatgatttcagaaatgttaaaatagactaacctctaccagcacattaaaagtgattgtttctgggtgataaaattattgatgatttttattttctttatttttctataaagatcatatattacttttataataaaacattataaaaac

SEQ ID NO: 58 - DNA, 2359 bp, Homo sapiens
cccaaatgtctcagaatgtatgtcccagaaacctgtggctgcttcaaccattgacagttttgctgctgctggcttctgcagacagtcaagctgcagctcccccaaaggctgtgctgaaacttgagcccccgtggatcaacgtgctccaggaggactctgtgactctgacatgccagggggctcgcagccctgagagcgactccattcagtggttccacaatgggaatctcattcccacccacacgcagcccagctacaggttcaaggccaacaacaatgacagcggggagtacacgtgccagactggccagaccagcctcagcgaccctgtgcatctgactgtgctttccgaatggctggtgctccagacccctcacctggagttccaggagggagaaaccatcatgctgaggtgccacagctggaaggacaagcctctggtcaaggtcacattcttccagaatggaaaatcccagaaattctcccgtttggatcccaccttctccatcccacaagcaaaccacagtcacagtggtgattaccactgcacaggaaacataggctacacgctgttctcatccaagcctgtgaccatcactgtccaagtgcccagcatgggcagctcttcaccaatggggatcattgtggctgtggtcattgcgactgctgtagcagccattgttgctgctgtagtggccttgatctactgcaggaaaaagcggatttcagccaattccactgatcctgtgaaggctgcccaatttgagccacctggacgtcaaatgattgccatcagaaagagacaacttgaagaaaccaacaatgactatgaaacagctgacggcggctacatgactctgaaccccagggcacctactgacgatgataaaaacatctacctgactcttcctcccaacgaccatgtcaacagtaataactaaagagtaacgttatgccatgtggtcatactctcagcttgctgatggatgacaaaaagaggggaattgttaaaggaaaatttaaatggagactggaaaaatcctgagcaaacaaaaccacctggcccttagaaatagctttaactttgcttaaactacaaacacaagcaaaacttcacggggtcatactacatacaagcataagcaaaacttaacttggatcatttctggtaaatgcttatgttagaaataagacaaccccagccaatcacaagcagcctactaacatataattaggtgactagggactttctaagaagatacctacccccaaaaaacaattatgtaattgaaaaccaaccgattgcctttattttgcttccacattttcccaataaatacttgcctgtgacattttgccactggaacactaaacttcatgaattgcgcctcagatttttcctttaacatcttttttttttttgacagagtctcaatctgttacccaggctggagtgcagtggtgctatcttggctcactgcaaacccgcctcccaggtttaagcgattcttatgcctcagcctcccagtagctgggattagaggcatgtgccatcatacccagctaatttttgtattttttattttttatttttagtagagacagggtttcgcaatgttggccaggccgatctcgaacttctggcctctagcgatctgcccgcctcggcctcccaaagtgctgggatgaccgcatcagccccaatgtccagcctctttaacatcttctttcctatgccctctctgtggatccctactgctggtttctgccttctccatgctgagaacaaaatcacctattcactgcttatgcagtcggaagctccagaagaacaaagagcccaattaccagaaccacattaagtctccattgttttgccttgggatttgagaagagaattagagaggtgaggatctggtatttcctggactaaattcccttggggaagacgaagggatgctgcagttccaaaagagaaggactcttccagagtcatctacctgagtcccaaagctccctgtcctgaaagccacagacaatatggtcccaaatgactgactgcaccttctgtgcctcagccgttcttgacatcaagaatcttctgttccacatccacacagccaatacaattagtcaaaccactgttattaacagatgtagcaacatgagaaacgcttatgttacaggttacatgagagcaatcatgtaagtctatatgacttcagaaatgttaaaatagactaacctctaacaacaaattaaaagtgattgtttcaaggtgatgcaattattgatgacctattttatttttctataatgatcatatattacctttgtaataaaacattataaccaaaac

SEQ ID NO: 59 - DNA, 3037 bp, Homo sapiens
aagcttcccatcctgttgcagtcccttactctcctcctgtgctctctcctcttcttcctatctagcccacccttttggtagctaagaattcctccctccattggagagtcacagaccaaagaggagtcaaataagaaaataagacctcaaagaaggaaaacaaagtgaaggccttgcatcagaagtcacgtggcagaaagccacctggatatctgaaaagaagaaagaattgagggatatccgctttttgcctcagagaccatccttagccctgaaggctttgtttctgctttaggtttcccagatgagcatctgaagtgctacagcaaggaacttcaagtttccagatacttgtctggattttgcaaggcgtagatgagtcacttgagaaggagaactggaatggcggcctgggttcatttccgttgtgcaatccaagggcctgtggagaaggggctgctgcaagactctgtgtgtggcagggggaggggtgggtacgtggatggcaatgggaggatcaattaactccacccaggagccaaatgaaacacacaaataaaaaacaaaacctgagtagtggtttttaggtcattctggagtagaaagagcattcatttatagcaaaggttggcgggcacctgtgtcagcccctgcctccactccacccctaacaagtatcaggtgcccacacgggcctgctgctcgcctcctgggcttttctaagccaagtgagacctgtcccagatgtccacgaatccactgggggagtggcactatcaagcagagtcatctgattttctgcctgggacctggaccattgtgagagtaaccaacatggggttacgggggagaatctggagagaagagaagaggttaacaaccctcccacttcctggccacccccctccaccttttctggtaaggagccctggagccctggagccctggctcctaggctgacagaccagcccagatccagtggcccggaggggcctgagctaaatccgcaggacctgggtaacacgaggaaggtaaagagttcctgtcctcacccctccccacccccaccttttctgtgatcttttcagcctttcactggtgacttgttcttccagggcccatttctctaccctacctgggtttcttctaacctggaaatctaatgatcaaatcacactaaaaagtcagctcctgtggattacatatcccaggagcatatagattttgaattttgaattttgaaagaaattctgcgtggagataatattgaggcagagacactgctagtggtcaaagatttgaaaggacaactttctgtgtgcaggcagggcctcggctggagatagatgggtctggacgaggcaggagagtgagaagttctgaggtgaaatgcaggaagccctcagagaatgctcctcccaccttgaatctcatccccagggtcttgctgtcccattcttggtgctgggtggatctaaatccaggagatgggggcaagcatctgggaaagctgagggcacactctggcagattctgtgtgtgtcctcagatgctcagccgcagacctttgggggagtaaagggggcacacccacccaccttgcctccaggctctttccttcctattcctgttctatggtggggctccattgcgagacttcagattgagaaatcagatgaagtttcaagaaaaggaaactggcaggtgacagagatgggtggagggactggggaaaggctgtttactccctcctgtctagtcggcttggtccctttagggctccggatatctttggtgacttgtccactccagtgtggcatcatgtggcagctgctcctcccaactgctctgctacttctaggtaagtcaggatatccctggttgagggagaagtttgagatgccttgggttcatcagagaccccttttcaggctacgaatgagactcccacaaagggatgggacccctcaccacatctatagctgtggattgagctaccaggacaagccaagatggggctagaaatgaggagaatgctggttccaattgggtcatagtcatgagtgaggccagtcacttcacccctctgggtcccagaatcactatgtggaactgaagagcttcgactagatggtccctagggtctgtctctttcagtttgacattccagggttctcctctatggtttttaatttctaccctttcttgtggggatatgggttgaggctgtttctgtggcttggtttagggaaattcaacctgtacccttaatttgtgagtttgcacagggagcaaggggtaagggagcagtgttgaaaatagggatttgtgttgacagtggcgcaagaggcatgaacagtagagaccagagagcaggtagcaaggtttccaccagaaacatcctgattcttgggaaaattgggctcctggggcagaggagggcaggggagttttaaactcactctatgttctaatcactctgatctctgcccccactcaatatttgatttactcttttttcttgcagtttcagctggcatgcggactggtgagtcagcttcatggtcttggattgacccagtggggcacatatggggacaatggccataagatattgggaaatgcttgttgaatgggaaaatgctgatgtggggttagcagggatagttcctccaacacagcagaacttggccctgtgcttctctggccagctttccttaagatactgaacaggccaaaaatggggccaagatgctctaagactgagccaccaagcatgggtttgcaatgagctcattctggctttgaggctccctgggaatggcagtgtagagcctgctcctctccctgtcctcaccccacattatcttggctcctcagaagatctcccaaaggctgtggtgttcctggagcctcaatggtacagcgtgcttgagaaggacagtgtgactctgaagtgccagggagcctactcccctgaggacaattccacacagtggtttcacaatgagagcctcatctcaagccaggcctcgag

SEQ ID NO: 60 - DNA, 3492 bp, Homo sapiens
gggagcacatgccggctcagagaatactatgaccagacagctcagatgtgctgcagcaaatgctcgccgggccaacatgcaaaagtcttctgtaccaagacctcggacaccgtgtgtgactcctgtgaggacagcacatacacccagctctggaactgggttcccgagtgcttgagctgtggctcccgctgtagctctgaccaggtggaaactcaagcctgcactcgggaacagaaccgcatctgcacctgcaggcccggctggtactgcgcgctgagcaagcaggaggggtgccggctgtgcgcgccgctgcgcaagtgccgcccgggcttcggcgtggccagaccaggaactgaaacatcagacgtggtgtgcaagccctgtgccccggggacgttctccaacacgacttcatccacggatatttgcaggccccaccagatctgtaacgtggtggccatccctgggaatgcaagcatggatgcagtctgcacgtccacgtcccccacccggagtatggccccaggggcagtacacttaccccagccagtgtccacacgatcccaacacacgcagccaactccagaacccagcactgctccaagcacctccttcctgctcccaatgggccccagccccccagctgaagggagcactggcgacttcgctcttccagttggactgattgtgggtgtgacagccttgggtctactaataataggagtggtgaactgtgtcatcatgacccaggtgaaaaagaagcccttgtgcctgcagagagaagccaaggtgcctcacttgcctgccgataaggcccggggtacacagggccccgagcagcagcacctgctgatcacagcgccgagctccagcagcagctccctggagagctcggccagtgcgttggacagaagggcgcccactcggaaccagccacaggcaccaggcgtggaggccagtggggccggggaggcccgggccagcaccgggagctcagattcttcccctggtggccatgggacccaggtcaatgtcacctgcatcgtgaacgtctgtagcagctctgaccacagctcacagtgctcctcccaagccagctccacaatgggagacacagattccagcccctcggagtccccgaaggacgagcaggtccccttctccaaggaggaatgtgcctttcggtcacagctggagacgccagagaccctgctggggagcaccgaagagaagcccctgccccttggagtgcctgatgctgggatgaagcccagttaaccaggccggtgtgggctgtgtcgtagccaaggtgggctgagccctggcaggatgaccctgcgaaggggccctggtccttccaggcccccaccactaggactctgaggctctttctgggccaagttcctctagtgccctccacagccgcagcctccctctgacctgcaggccaagagcagaggcagcgagttgtggaaagcctctgctgccatggcgtgtccctctcggaaggctggctgggcatggacgttcggggcatgctggggcaagtccctgactctctgtgacctgccccgcccagctgcacctgccagcctggcttctggagcccttgggttttttgtttgtttgtttgtttgtttgtttgtttctccccctgggctctgccccagctctggcttccagaaaaccccagcatccttttctgcagaggggctttctggagaggagggatgctgcctgagtcacccatgaagacaggacagtgcttcagcctgaggctgagactgcgggatggtcctggggctctgtgcagggaggaggtggcagccctgtagggaacggggtccttcaagttagctcaggaggcttggaaagcatcacctcaggccaggtgcagtggctcacgcctatgatcccagcactttgggaggctgaggcgggtggatcacctgaggttaggagttcgagaccagcctggccaacatggtaaaaccccatctctactaaaaatacagaaattagccgggcgtggtggcgggcacctatagtcccagctactcagaagcctgaggctgggaaatcgtttgaacccgggaagcggaggttgcagggagccgagatcacgccactgcactccagcctgggcgacagagcgagagtctgtctcaaaagaaaaaaaaaaagcaccgcctccaaatgctaacttgtccttttgtaccatggtgtgaaagtcagatgcccagagggcccaggcaggccaccatattcagtgctgtggcctgggcaagataacgcacttctaactagaaatctgccaattttttaaaaaagtaagtaccactcaggccaacaagccaacgacaaagccaaactctgccagccacatccaaccccccacctgccatttgcaccctccgccttcactccggtgtgcctgcagccccgcgcctccttccttgctgtcctaggccacaccatctcctttcagggaatttcaggaactagagatgactgagtcctcgtagccatctctctactcctacctcagcctagaccctcctcctcccccagaggggtgggttcctcttccccactccccaccttcaattcctgggccccaaacgggctgccctgccactttggtacatggccagtgtgatcccaagtgccagtcttgtgtctgcgtctgtgttgcgtgtcgtgggtgtgtgtagccaaggtcggtaagttgaatggcctgccttgaagccactgaagctgggattcctccccattagagtcagccttccccctcccagccagggccctgcagaggggaaaccagtgtagccttgcccggattctgggaggaagcaggttgaggggctcctggaaaggctcagtctcaggagcatggggataaaggagaaggcatgaaattgtctagcagagcaggggcagggtgataaattgttgataaattccactggacttgagcttggcagctgaactattggagggtgggagagcccagccattaccatggagacaagaagggttttccaccctggaatcaagatgtcagactggctggctgcagtgacgtgcacctgtactcaggaggctgaggggaggatcactggagcccaggagtttgaggctgcagcgagctatgatcgcgccactacactccagcctgagcaacagagtgagaccctgtctcttaaagaaaaaaaaagtcagactgctgggactggccaggtttctgcccacattggacccacatgaggacatgatggagcgcacctgccccctggtggacagtcctgggagaacctcaggcttccttggcatcacagggcagagccgggaagcgatgaatttggagactctgtggggccttggttcccttgtgtgtgtgtgttgatcccaagacaatgaaagtttgcactgtatgctggacggcattcctgcttatcaataaacctgtttgttttacacgtcgaaaaaaaa

SEQ ID NO: 61 - DNA, 3655 bp, Homo sapiens
cttcagatagattatatctggagtgaaggatcctgccacctacgtatctggcatagtattctgtgtagtgggatgagcagagaacaaaaacaaaataatccagtgagaaaagcccgtaaataaaccttcagaccagagatctattctccagcttattttaagctcaacttaaaaagaagaactgttctctgattcttttcgccttcaatacacttaatgatttaactccaccctccttcaaaagaaacagcatttcctacttttatactgtctatatgattgatttgcacagctcatctggccagaagagctgagacatccgttcccctacaagaaactctccccgggtggaacaagatggattatcaagtgtcaagtccaatctatgacatcaattattatacatcggagccctgccaaaaaatcaatgtgaagcaaatcgcagcccgcctcctgcctccgctctactcactggtgttcatctttggttttgtgggcaacatgctggtcatcctcatcctgataaactgcaaaaggctgaagagcatgactgacatctacctgctcaacctggccatctctgacctgtttttccttcttactgtccccttctgggctcactatgctgccgcccagtgggactttggaaatacaatgtgtcaactcttgacagggctctattttataggcttcttctctggaatcttcttcatcatcctcctgacaatcgataggtacctggctgtcgtccatgctgtgtttgctttaaaagccaggacggtcacctttggggtggtgacaagtgtgatcacttgggtggtggctgtgtttgcgtctctcccaggaatcatctttaccagatctcaaaaagaaggtcttcattacacctgcagctctcattttccatacagtcagtatcaattctggaagaatttccagacattaaagatagtcatcttggggctggtcctgccgctgcttgtcatggtcatctgctactcgggaatcctaaaaactctgcttcggtgtcgaaatgagaagaagaggcacagggctgtgaggcttatcttcaccatcatgattgtttattttctcttctgggctccctacaacattgtccttctcctgaacaccttccaggaattctttggcctgaataattgcagtagctctaacaggttggaccaagctatgcaggtgacagagactcttgggatgacgcactgctgcatcaaccccatcatctatgcctttgtcggggagaagttcagaaactacctcttagtcttcttccaaaagcacattgccaaacgcttctgcaaatgctgttctattttccagcaagaggctcccgagcgagcaagctcagtttacacccgatccactggggagcaggaaatatctgtgggcttgtgacacggactcaagtgggctggtgacccagtcagagttgtgcacatggcttagttttcatacacagcctgggctgggggtggggtgggagaggtcttttttaaaaggaagttactgttatagagggtctaagattcatccatttatttggcatctgtttaaagtagattagatcttttaagcccatcaattatagaaagccaaatcaaaatatgttgatgaaaaatagcaacctttttatctccccttcacatgcatcaagttattgacaaactctcccttcactccgaaagttccttatgtatatttaaaagaaagcctcagagaattgctgattcttgagtttagtgatctgaacagaaataccaaaattatttcagaaatgtacaactttttacctagtacaaggcaacatataggttgtaaatgtgtttaaaacaggtctttgtcttgctatggggagaaaagacatgaatatgattagtaaagaaatgacacttttcatgtgtgatttcccctccaaggtatggttaataagtttcactgacttagaaccaggcgagagacttgtggcctgggagagctggggaagcttcttaaatgagaaggaatttgagttggatcatctattgctggcaaagacagaagcctcactgcaagcactgcatgggcaagcttggctgtagaaggagacagagctggttgggaagacatggggaggaaggacaaggctagatcatgaagaaccttgacggcattgctccgtctaagtcatgagctgagcagggagatcctggttggtgttgcagaaggtttactctgtggccaaaggagggtcaggaaggatgagcatttagggcaaggagaccaccaacagccctcaggtcagggtgaggatggcctctgctaagctcaaggcgtgaggatgggaaggagggaggtattcgtaaggatgggaaggagggaggtattcgtgcagcatatgaggatgcagagtcagcagaactggggtggatttggtttggaagtgagggtcagagaggagtcagagagaatccctagtcttcaagcagattggagaaacccttgaaaagacatcaagcacagaaggaggaggaggaggtttaggtcaagaagaagatggattggtgtaaaaggatgggtctggtttgcagagcttgaacacagtctcacccagactccaggctgtctttcactgaatgcttctgacttcatagatttccttcccatcccagctgaaatactgaggggtctccaggaggagactagatttatgaatacacgaggtatgaggtctaggaacatacttcagctcacacatgagatctaggtgaggattgattacctagtagtcatttcatgggttgttgggaggattctatgaggcaaccacaggcagcatttagcacatactacacattcaataagcatcaaactcttagttactcattcagggatagcactgagcaaagcattgagcaaaggggtcccatataggtgagggaagcctgaaaaactaagatgctgcctgcccagtgcacacaagtgtaggtatcattttctgcatttaaccgtcaataggcaaaggggggaagggacatattcatttggaaataagctgccttgagccttaaaacccacaaaagtacaatttaccagcctccgtatttcagactgaatgggggtggggggggcgccttaggtacttattccagatgccttctccagacaaaccagaagcaacagaaaaaatcgtctctccctccctttgaaatgaatataccccttagtgtttgggtatattcatttcaaagggagagagagaggtttttttctgttctttctcatatgattgtgcacatacttgagactgttttgaatttgggggatggctaaaaccatcatagtacaggtaaggtgagggaatagtaagtggtgagaactactcagggaatgaaggtgtcagaataataagaggtgctactgactttctcagcctctgaatatgaacggtgagcattgtggctgtcagcaggaagcaacgaagggaaatgtctttccttttgctcttaagttgtggagagtgcaacagtagcataggaccctaccctctgggccaagtcaaagacattctgacatcttagtatttgcatattcttatgtatgtgaaagttacaaattgcttgaaagaaaatatgcatctaataaaaaacaccttcta

SEQ ID NO: 62 - DNA, 3655 bp, Homo sapiens
cttcagatagattatatctggagtgaagaatcctgccacctatgtatctggcatagtattctgtgtagtgggatgagcagagaacaaaaacaaaataatccagtgagaaaagcccgtaaataaactttcagaccagagatctattctctagcttattttaagctcaacttaaaaggaagaactgttctctgattcttttcgccttcaatacacttaatgatttaactccaccctccttcaaaagaaacagcatttcctacttttatactgtctatatgattgatttgcacagctcatctggccagaagagctgagacatccgttcccctacaagaaactctccccgggtggaacaagatggattatcaagtgtcaagtccaatctatgacatcaattattatacatcggagccctgccaaaaaatcaatgtgaagcaaatcgcagcccgcctcctgcctccgctctactcactggtgttcatctttggttttgtgggcaacatgctggtcatcctcatcctgataaactgcaaaaggctgaagagcatgactgacatctacctgctcaacctggccatctctgacctgtttttccttcttactgtccccttctgggctcactatgctgccgcccagtgggactttggaaatacaatgtgtcaactcttgacagggctctattttataggcttcttctctggaatcttcttcatcatcctcctgacaatcgataggtacctggctgtcgtccatgctgtgtttgctttaaaagccaggacggtcacctttggggtggtgacaagtgtgatcacttgggtggtggctgtgtttgcgtctctcccaggaatcatctttaccagatctcaaaaagaaggtcttcattacacctgcagctctcattttccatacagtcagtatcaattctggaagaatttccagacattaaagatagtcatcttggggctggtcctgccgctgcttgtcatggtcatctgctactcgggaatcctaaaaactctgcttcggtgtcgaaatgagaagaagaggcacagggctgtgaggcttatcttcaccatcatgattgtttattttctcttctgggctccctacaacattgtccttctcctgaacaccttccaggaattctttggcctgaataattgcagtagctctaacaggttggaccaagctatgcaggtgacagagactcttgggatgacgcactgctgcatcaaccccatcatctatgcctttgtcggggagaagttcagaaactacctcttagtcttcttccaaaagcacattgccaaacgcttctgcaaatgctgttctattttccagcaagaggctcccgagcgagcaagctcagtttacacccgatccactggggagcaggaaatatctgtgggcttgtgacacggactcaagtgggctggtgacccagtcagagttgtgcacatggcttagttttcatacacagcctgggctgggggtggggtgggagaggtcttttttaaaaggaagttactgttatagagggtctaagattcatccatttatttggcatctgtttaaagtagattagatcttttaagcccatcaattatagaaagccaaatcaaaatatgttgatgaaaaatagcaacctttttatctccccttcacatgcatcaagttattgacaaactctcccttcactccgaaagttccttatgtatatttaaaagaaagcctcagagaattgctgattcttgagtttagtgatctgaacagaaataccaaaattatttcagaaatgtacaactttttacctagtacaaggcaacatataggttgtaaatgtgtttaaaacaggtctttgtcttgctatggggagaaaagacatgaatatgattagtaaagaaatgacacttttcatgtgtgatttcccctccaaggtatggttaataagtttcactgacttagaaccaggcgagagacttgtggcctgggagagctggggaagcttcttaaatgagaaggaatttgagttggatcatctattgctggcaaagacagaagcctcactgcaagcactgcatgggcaagcttggctgtagaaggagacagagctggttgggaagacatggggaggaaggacaaggctagatcatgaagaaccttgacggcattgctccgtctaagtcatgagctgagcagggagatcctggttggtgttgcagaaggtttactctgtggccaaaggagggtcaggaaggatgagcatttagggcaaggagaccaccaacagccctcaggtcagggtgaggatggcctctgctaagctcaaggcgtgaggatgggaaggagggaggtattcgtaaggatgggaaggagggaggtattcgtgcagcatatgaggatgcagagtcagcagaactggggtggatttggtttggaagtgagggtcagagaggagtcagagagaatccctagtcttcaagcagattggagaaacccttgaaaagacatcaagcacagaaggaggaggaggaggtttaggtcaagaagaagatggattggtgtaaaaggatgggtctggtttgcagagcttgaacacagtctcacccagactccaggctgtctttcactgaatgcttctgacttcatagatttccttcccatcccagctgaaatactgaggggtctccaggaggagactagatttatgaatacacgaggtatgaggtctaggaacatacttcagctcacacatgagatctaggtgaggattgattacctagtagtcatttcatgggttgttgggaggattctatgaggcaaccacaggcagcatttagcacatactacacattcaataagcatcaaactcttagttactcattcagggatagcactgagcaaagcattgagcaaaggggtcccatagaggtgagggaagcctgaaaaactaagatgctgcctgcccagtgcacacaagtgtaggtatcattttctgcatttaaccgtcaataggcaaaggggggaagggacatattcatttggaaataagctgccttgagccttaaaacccacaaaagtacaatttaccagcctccgtatttcagactgaatgggggtggggggggcgccttaggtacttattccagatgccttctccagacaaaccagaagcaacagaaaaaatcgtctctccctccctttgaaatgaatataccccttagtgtttgggtatattcatttcaaagggagagagagaggtttttttctgttctttctcatatgattgtgcacatacttgagactgttttgaatttgggggatggctaaaaccatcatagtacaggtaaggtgagggaatagtaagtggtgagaactactcagggaatgaaggtgtcagaataataagaggtgctactgactttctcagcctctgaatatgaacggtgagcattgtggctgtcagcaggaagcaacgaagggaaatgtctttccttttgctcttaagttgtggagagtgcaacagtagcataggaccctaccctctgggccaagtcaaagacattctgacatcttagtatttgcatattcttatgtatgtgaaagttacaaattgcttgaaagaaaatatgcatctaataaaaaacaccttcta

SEQ ID NO: 63 - DNA, 2139 bp, Homo sapiens
agacaggggtagtgcgaggccgggcacagccttcctgtgtggttttaccgcccagagagcgtcatggacctggggaaaccaatgaaaagcgtgctggtggtggctctccttgtcattttccaggtatgcctgtgtcaagatgaggtcacggacgattacatcggagacaacaccacagtggactacactttgttcgagtctttgtgctccaagaaggacgtgcggaactttaaagcctggttcctccctatcatgtactccatcatttgtttcgtgggcctactgggcaatgggctggtcgtgttgacctatatctatttcaagaggctcaagaccatgaccgatacctacctgctcaacctggcggtggcagacatcctcttcctcctgacccttcccttctgggcctacagcgcggccaagtcctgggtcttcggtgtccacttttgcaagctcatctttgccatctacaagatgagcttcttcagtggcatgctcctacttctttgcatcagcattgaccgctacgtggccatcgtccaggctgtctcagctcaccgccaccgtgcccgcgtccttctcatcagcaagctgtcctgtgtgggcatctggatactagccacagtgctctccatcccagagctcctgtacagtgacctccagaggagcagcagtgagcaagcgatgcgatgctctctcatcacagagcatgtggaggcctttatcaccatccaggtggcccagatggtgatcggctttctggtccccctgctggccatgagcttctgttaccttgtcatcatccgcaccctgctccaggcacgcaactttgagcgcaacaaggccatcaaggtgatcatcgctgtggtcgtggtcttcatagtcttccagctgccctacaatggggtggtcctggcccagacggtggccaacttcaacatcaccagtagcacctgtgagctcagtaagcaactcaacatcgcctacgacgtcacctacagcctggcctgcgtccgctgctgcgtcaaccctttcttgtacgccttcatcggcgtcaagttccgcaacgatctcttcaagctcttcaaggacctgggctgcctcagccaggagcagctccggcagtggtcttcctgtcggcacatccggcgctcctccatgagtgtggaggccgagaccaccaccaccttctccccataggcgactcttctgcctggactagagggacctctcccagggtccctggggtggggatagggagcagatgcaatgactcaggacatccccccgccaaaagctgctcagggaaaagcagctctcccctcagagtgcaagcccctgctccagaagatagcttcaccccaatcccagctacctcaaccaatgccaaaaaaagacagggctgataagctaacaccagacagacaacactgggaaacagaggctattgtcccctaaaccaaaaactgaaagtgaaagtccagaaactgttcccacctgctggagtgaaggggccaaggagggtgagtgcaaggggcgtgggagtggcctgaagagtcctctgaatgaaccttctggcctcccacagactcaaatgctcagaccagctcttccgaaaaccaggccttatctccaagaccagagatagtggggagacttcttggcttggtgaggaaaagcggacatcagctggtcaaacaaactctctgaacccctccctccatcgttttcttcactgtcctccaagccagcgggaatggcagctgccacgccgccctaaaagcacactcatcccctcacttgccgcgtcgccctcccaggctctcaacaggggagagtgtggtgtttcctgcaggccaggccagctgcctccgcgtgatcaaagccacactctgggctccagagtggggatgacatgcactcagctcttggctccactgggatgggaggagaggacaagggaaatgtcaggggcggggagggtgacagtggccgcccaaggcccacgagcttgttctttgttctttgtcacagggactgaaaacctctcctcatgttctgctttcgattcgttaagagagcaacattttacccacacacagataaagttttcccttgaggaaacaacagctttaaaag

SEQ ID NO: 64 - DNA, 1679 bp, Homo sapiens
gtttgttggctgcggcagcaggtagcaaagtgacgccgagggcctgagtgctccagtagccaccgcatctggagaaccagcggttaccatggaggggatcagtatatacacttcagataactacaccgaggaaatgggctcaggggactatgactccatgaaggaaccctgtttccgtgaagaaaatgctaatttcaataaaatcttcctgcccaccatctactccatcatcttcttaactggcattgtgggcaatggattggtcatcctggtcatgggttaccagaagaaactgagaagcatgacggacaagtacaggctgcacctgtcagtggccgacctcctctttgtcatcacgcttcccttctgggcagttgatgccgtggcaaactggtactttgggaacttcctatgcaaggcagtccatgtcatctacacagtcaacctctacagcagtgtcctcatcctggccttcatcagtctggaccgctacctggccatcgtccacgccaccaacagtcagaggccaaggaagctgttggctgaaaaggtggtctatgttggcgtctggatccctgccctcctgctgactattcccgacttcatctttgccaacgtcagtgaggcagatgacagatatatctgtgaccgcttctaccccaatgacttgtgggtggttgtgttccagtttcagcacatcatggttggccttatcctgcctggtattgtcatcctgtcctgctattgcattatcatctccaagctgtcacactccaagggccaccagaagcgcaaggccctcaagaccacagtcatcctcatcctggctttcttcgcctgttggctgccttactacattgggatcagcatcgactccttcatcctcctggaaatcatcaagcaagggtgtgagtttgagaacactgtgcacaagtggatttccatcaccgaggccctagctttcttccactgttgtctgaaccccatcctctatgctttccttggagccaaatttaaaacctctgcccagcacgcactcacctctgtgagcagagggtccagcctcaagatcctctccaaaggaaagcgaggtggacattcatctgtttccactgagtctgagtcttcaagttttcactccagctaacacagatgtaaaagacttttttttatacgataaataacttttttttaagttacacatttttcagatataaaagactgaccaatattgtacagtttttattgcttgttggatttttgtcttgtgtttctttagtttttgtgaagtttaattgacttatttatataaattttttttgtttcatattgatgtgtgtctaggcaggacctgtggccaagttcttagttgctgtatgtctcgtggtaggactgtagaaaagggaactgaacattccagagcgtgtagtgaatcacgtaaagctagaaatgatccccagctgtttatgcatagataatctctccattcccgtggaacgtttttcctgttcttaagacgtgattttgctgtagaagatggcacttataaccaaagcccaaagtggtatagaaatgctggtttttcagttttcaggagtgggttgatttcagcacctacagtgtacagtcttgtattaagttgttaataaaagtacatgttaaacttacttagtgttatg

SEQ ID NO: 65 - DNA, 2291 bp, Homo sapiens
gaacaatgaagaaagccccacagccactgttgctgagcagggagaggatattacctccaaaaaagacaggggagtattaaagattgtcaaaagagtggggaatggtgaggaaacgccgatgattggagacaaagtttatgtccattacaaaggaaaattgtcaaatggaaagaagtttgattccagtcatgatagaaatgaaccatttgtctttagtcttggcaaaggccaagtcatcaaggcatgggacattggggtggctaccatgaagaaaggagagatatgccatttactgtgcaaaccagaatatgcatatggctcggctggcagtctccctaaaattccctcgaatgcaactctcttttttgagattgagctccttgatttcaaaggagaggatttatttgaagatggaggcattatccggagaaccaaacggaaaggagagggatattcaaatccaaacgaaggagcaacagtagaaatccacctggaaggccgctgtggtggaaggatgtttgactgcagagatgtggcattcactgtgggcgaaggagaagaccacgacattccaattggaattgacaaagctctggagaaaatgcagcgggaagaacaatgtattttatatcttggaccaagatatggttttggagaggcagggaagcctaaatttggcattgaacctaatgctgagcttatatatgaagttacacttaagagcttcgaaaaggccaaagaatcctgggagatggataccaaagaaaaattggagcaggctgccattgtcaaagagaagggaaccgtatacttcaagggaggcaaatacatgcaggcggtgattcagtatgggaagatagtgtcctggttagagatggaatatggtttatcagaaaaggaatcgaaagcttctgaatcatttctccttgctgcctttctgaacctggccatgtgctacctgaagcttagagaatacaccaaagctgttgaatgctgtgacaaggcccttggactggacagtgccaatgagaaaggcttgtataggaggggtgaagcccagctgctcatgaacgagtttgagtcagccaagggtgactttgagaaagtgctggaagtaaacccccagaataaggctgcaagactgcagatctccatgtgccagaaaaaggccaaggagcacaacgagcgggaccgcaggatatacgccaacatgttcaagaagtttgcagagcaggatgccaaggaagaggccaataaagcaatgggcaagaagacttcagaaggggtcactaatgaaaaaggaacagacagtcaagcaatggaagaagagaaacctgagggccacgtatgacgccacgccaaggagggaagagtcccagtgaactcggcccctcctcaatgggctttcccccaactcaggacagaacagtgtttaatgtaaagtttgttatagtctatgtgattctggaagcaaatggcaaaaccagtagcttcccaaaaacagcccccctgctgctgcccggagggttcactgaggggtggcacgggaccactccaggtggaacaaacagaaatgactgtggtgtggagggagtgagccagcagcttaagtccagctcatttcagtttctatcaaccttcaagtatccaattcagggtccctggagatcatcctaacaatgtggggctgttaggttttacctttgaactttcatagcactgcagaaaccttttaaaaaaaaatgcttcatgaatttctcctttcctacagttgggtagggtaggggaaggaggataagcttttgttttttaaatgactgaagtgctataaatgtagtctgttgcatttttaaccaacagaacccacagtagaggggtctcatgtctccccagttccacagcagtgtcacagacgtgaaagccagaacctcagaggccacttgcttgctgacttagcctcctcccaaagtccccctcctcagccagcctccttgtgagagtggctttctaccacacacagcctgtccctgggggagtaattctgtcattcctaaaacacccttcagcaatgataatgagcagatgagagtttctggattagcttttcctattttcgatgaagttctgagatactgaaatgtgaaaagagcaatcagaattgtgctttttctcccctcctctattccttttagggaataatattcaatacacagtacttcctcccagaaaaaaaaaaaaaaaaaaaaaaaaaaaaaaaaaaaaaaaaaaaaaaaaaaaaaaaaaaaaaaaaa

SEQ ID NO: 66 - DNA, 3265 bp, Homo sapiens
  misc_feature (242)..(242): n is a, c, g, or t
  misc_feature (443)..(443): n is a, c, g, or t
  misc_feature (445)..(445): n is a, c, g, or t
atgggcttgtagtggagacatgggcctggagatggagatatgggcctggagatggagatatgggcctgcagtagagatatgggcctggagtggagatatgggcctggagtggagatatggatctggaggtggagatacgggcctgcagtagagatatgggcctggagtggagatatgggccaggagtggagttatgggcctagaggtggatatctgggcctggagtggagatatgggcctangaaggagatatgggcctgggtgtggagatatgggactggagaggtgatatgggcctggagtggagatatgggcttagggtggagatctgggcctggggcagagatatgggactggattggagatatgggcctagggtggaaatatcagcctggagtggagatacgggcttgtggtggggatctgggcctggaaactgggtntntgcacagccgacagccctgttcttgggtgcaggtaggcactgagggtgagtttaacttcagcccaggaagggcctggctgccaagactcacagcccagtgggggcagcaagggagtcrtggtttgcctgcagatggatggtccatcatgatctttctttccagggttcttcttgctgcagggggcctggccacatgagggtgagtccttctccaaaccttcggttgtcatctccccacataagaggattttcctgaaacaggagggaagtcctgtcagggagtctctcataaactgggaagagaggaccctggggtgctcggcccacatttctgaccttgcctccctggcctctcaaccccttggcagagtcaagttctgtggggaccagggttagactggggtgctcaaagctggggtgtgtggtggggaagtggtaggaacagcagatcctctgaggacaaaggtgttgctcacacacttcagcgtttccatgatggtaggggctgcagtgtggctgctgtcattctaccagaagaggtgggaaaccacagccatggccctgacattccaaatcctctgatggggactcagttgtttattttcgttcaggcatccgctgatatccactcacaaaggacatgccctccacctcatgtctaccctgtgttgttttatgtgagtaatcttacagtattaaaatctagtaggagtctctttactcagcacttgctcaaagttctcagctgaggcttttgttgtagggagacaccatgtctttgcgggatgggtccttccttcagccctgggcaccaaggtgtgatagtagccatagaaacgtggaaagcgaggagaatcttctgagcacagggagggaggggcagttccacatcctcctctctaaggcggcgcctccttctccccaaggtggtcaggacaagcccttgctgtctgcctggcccagccttgtggtgcctctaggacatgtcattcttcggtgtcactcttatcttgggtttaacaacttcagtctgtacaaggaaggtggggtgcctgtccctgagctctacaacagaatattctggaacagccttttcatgggccctgtgacccccgcacaacagggacatacagatgtcggggttcacacacacactcccccagtgggtggtcagcacccagcaaccccctggtgatcgtggtcataggtcagagggctcctgtcttggattctccttgtcccacctcctgaatcccagagcttccggtgggcatgtccaccagcgtcccatcatccagaccctaactgtatttgggataaaaggggattgaatacaggggaaatgggtgctgtggtggaaagaataattgtccccaatgatgactgcattctaatccctgcagtctgtgactatttatgttataggggaaggcactgaaggggaagatggagctcaggttgttgagttgaccttgagatggggagacagcctggactgtcctgctgggctcagtgtaatcacaagggtgcacatgagaggagaaggaagaggggagtggcgattagagcagtgcaatggaagtctccatcagctttgaaggtggaggaaggccatgagccatgaatgcaggtggcctatagaggctggaaaagtcaaggaactgattctcctgggtctccagagggaacgcagccctgcagatgccttgattttagccctcaaaaaacagggtccgatttctgtctccagaaacggaaggggtcagtgtgctctctcctgctgccatgsttttgataattttttacagcacccacaggaaacccacactggaacccaggtcaaggacaagataagaaaggacacaaggatagccgggcgtggtggcaggtgcatgtaatcctagcaactcaggaggttgagggcaggagaatyamttgaacccaggagacagaggttgcagtgagcctagaccacaccacttcactccagcctgggtgaaggagtgagamtytgactccmaaattaattaattaattaaagaaaccaaacaaagagaaggttggctacaccgagatcagcaagggtgggatgatgatgccaccaccaggctccatccacatagggaggggttgatactcctcaaaccagcaccagaagccagcctatggaagctggcaccatggagaaggcacaggcatggcaagagtggctcccagtccccaccaggaacagggtgtgtggacactggtgcctgccttactgatcagttcataccttctgccaaggattccaattcgtccaaaagagattgaaccagtctgctaagagcctggacgtgcagcctatcctggttcctcttccacccccacatagaagcaggaaagacattagttcgaaatagatacaacagcccaagagatgaggctgagcccagcgtcaagggaatcaggagctactagagacagagggacagagaagagggagggagacagatggaaggacctgtaccaggagttatgggcacagaaaagaacatgaagacacagagaggaaggagagagataagacaccagcgaggggaagcctcactcattctaggtgccatggatgggatgataaagagagatgccttctaaagtcacaacttctcttcctaggagtccacagaaaaccttccctcctggcccacccaggtcccctggtgaaatcagaagagacagtcatcctgcaatgttggtcagatgtcatgtttgagcacttccttctgcacagagaggggaagtttaaggacactttgcacctcattaagccgaattctg

SEQ ID NO: 67 - DNA, 640 bp, Homo sapiens
tcgggcctccgaaaccatgaactttctgctgtcttgggtgcattggagccttgccttgctgctctacctccaccatgccaagtggtcccaggctgcacccatggcagaaggaggggggcagaatcatcacgaagtggtgaagttcatggatgtctatcagcgcagctactgccatccaatcgagaccctggtggacatcttccaggagtaccctgatgagatcgagtacatcttcaagccatcctgtgtgcccctgatgcgatgcgggggctgctgcaatgacgagggcctggagtgtgtgcccactgaggagtccaacatcaccatgcagattatgcggatcaaacctcaccaaggccagcacataggagagatgagcttcctacagcacaacaaatgtgaatgcagaccaaagaaagatagagcaagacaagaaaatccctgtgggccttgctcagagcggagaaagcatttgtttgtacaagatccgcagacgtgtaaatgttcctgcaaaaacacagactcgcgttgcaaggcgaggcagcttgagttaaacgaacgtacttgcagatgtgacaagccgaggcggtgagccgggcaggaggaaggagcctccctcagggtttcgggaaccagatct

SEQ ID NO: 68 - DNA, 1172 bp, Homo sapiens
gcgatgcgggcgcccccggcgggcggccccggcgggcaccatgagccctctgctccgccgcctgctgctcgccgcactcctgcagctggcccccgcccaggcccctgtctcccagcctgatgcccctggccaccagaggaaagtggtgtcatggatagatgtgtatactcgcgctacctgccagccccgggaggtggtggtgcccttgactgtggagctcatgggcaccgtggccaaacagctggtgcccagctgcgtgactgtgcagcgctgtggtggctgctgccctgacgatggcctggagtgtgtgcccactgggcagcaccaagtccggatgcagatcctcatgatccggtacccgagcagtcagctgggggagatgtccctggaagaacacagccagtgtgaatgcagacctaaaaaaaaggacagtgctgtgaagccagacagggctgccactccccaccaccgtccccagccccgttctgttccgggctgggactctgcccccggagcaccctccccagctgacatcacccatcccactccagccccaggcccctctgcccacgctgcacccagcaccaccagcgccctgacccccggacctgccgctgccgctgccgacgccgcagcttcctccgttgccaagggcggggcttagagctcaacccagacacctgcaggtgccggaagctgcgaaggtgacacatggcttttcagactcagcagggtgacttgcctcagaggctatatcccagtgggggaacaaagaggagcctggtaaaaaacagccaagcccccaagacctcagcccaggcagaagctgctctaggacctgggcctctcagagggctcttctgccatcccttgtctccctgaggccatcatcaaacaggacagagttggaagaggagactgggaggcagcaagaggggtcacataccagctcaggggagaatggagtactgtctcagtttctaaccactctgtgcaagtaagcatcttacaactggctcttcctcccctcactaagaagacccaaacctctgcataatgggatttgggctttggtacaagaactgtgacccccaaccctgataaaagagatggaaggaaaaaaaaaaaaaaaaaaaaaaaaaaaaaaaaaaaaaaaaaaaaaaaaaaaaaaa

SEQ ID NO: 69 - DNA, 2521 bp, Homo sapiens
gcctcacacgctcctagaggaccacctcctgagagagttctttcaccccctcttctttctccaagctcccctcctgctctccctccctgcccaatacaatgcattcttgagtggcagcgtctggactccaggcagccccagagaaccgaagcaagccaaagagaggactggagccaagatactggtgggggagattggatgcctggctttctttgaggacatctttggagcgagggtggctttggggtgggggcttgtgctgcagggaatacagccaggccccaagatggacacttctgggcacttccatgactcgggggtgggggacttggatgaagaccccaagtgcccctgtccatcctctggggatgagcagcagcagcagcagcagcagcaacagcagcagcagccaccaccgccagcgccaccagcagccccccagcagcccctgggaccctcgctgcagcctcagcctccgcagcttcagcagcagcagcagcagcagcagcagcagcagcagcagcagccaccgcatcccctgtctcagctcgcccaactccagagccagcccgtccaccctggcctgctgcactcctctcccaccgctttcagagctccaccttcgtccaactccaccgccatcctccacccttcctccaggcaaggcagccagctcaatctcaatgaccacttgcttggccactctccaagttccacagctacaagtgggcctggcggaggcagccggcaccgacaggccagccccctggtgcaccggcgggacagcaaccccttcacggagatcgccatgagctcctgcaagtatagcggtggggtcatgaagcccctcagccgcctcagcgcctcccggaggaacctcatcgaggccgagactgagggccaacccctccagcttttcagccctagcaaccccccggagatcgtcatctcctcccgggaggacaaccatgcccaccagaccctgctccatcaccctaatgccacccacaaccaccagcatgccggcaccgccgccagcagcaccaccttccccaaagccaacaagcggaaaaaccagaacattggctataagctgggacacaggagggccccgtttgaaaagagaaagcgactgagtgactatgctctgatttttgggatgtttggaattgttgttatggtgatagagaccgagctctcttggggtttgtactcaaaggactccatgttttcgttggccctgaaatgccttatcagtctgtccaccatcatccttttgggcttgatcatcgcctaccacacacgtgaagcccagctcttcgtgatcgacaatggcgcggatgactggcggatagccatgacctacgagcgcatcctgtacatcagcctggagatgctggtgtgcgccatccaccccattcctggcgagtacaagttcttctggacggctcgcctggccttctcctacacaccctcccgggcggaggccgatgtggacatcatcctgtctatccccatgttcctgcgcctgtacctgatcgcccgagtcatgctgctgcacagcaagctcttcaccgatgcctcgtcccgcagcatcggggccctcaacaagatcaacttcaacacccgctttgtcatgaagacgctcatgaccatctgccctggcactgtgctgctcgtgttcagcatctctctgtggatcattgctgcctggaccgtccgtgcctgtgaaaggtaccatgaccagcaggacgtaactagtaactttctgggtgccatgtggctcatctccatcacattcctttccattggttatggggacatggtgccccacacatactgtgggaaaggtgtctgtctcctcactggcatcatgggtgcaggctgcactgcccttgtggtggccgtggtggcccgaaagctggaactcaccaaagcggagaagcacgttcataacttcatgatggacactcagctcaccaagcggatcaagaatgctgcagccaatgtccttcgggaaacatggttaatctataaacacacaaagctgctaaagaagattgaccatgccaaagtgaggaaacaccagaggaagttcctccaagctatccaccagttgaggagcgtcaagatggaacagaggaagctgagtgaccaagccaacactctggtggacctttccaagatgcagaatgtcatgtatgacttaatcacagaactcaatgaccggagcgaagacctggagaagcagattggcagcctggagtcgaagctggagcatctcaccgccagcttcaactccctgccgctgctcatcgccgacaccctgcgccagcagcagcagcagctcctgtctgccatcatcgaggcccggggtgtcagcgtggcagtgggcaccacccacaccccaatctccgatagccccattggggtcagctccacctccttcccgaccccgtacacaagttcaagcagttgctaaataaatctccccactccagaagcattaaaaaaaaaaaaa

SEQ ID NO: 70 - DNA, 2393 bp, Homo sapiens
catctttggagcgagggtggctttggggtgggggcttgtgctgcagggaatacagccaggccccaagatggacacttctgggcacttccatgactcgggggtgggggacttggatgaagaccccaagtgcccctgtccatcctctggggatgagcagcagcagcagcagcagcagcaacagcagcagcagccaccaccgccagcgccaccagcagccccccagcagcccctgggaccctcgctgcagcctcagcctccgcagcttcagcagcagcagcagcagcagcagcagcagcagcagcagcagcagcagcagcagcagcagccaccgcatcccctgtctcagctcgcccaactccagagccagcccgtccatcctggcctgctgcactcctctcccaccgctttcagggcccccccttcgtccaactccaccgccatcctccacccttcctccaggcaaggcagccagctcaatctcaatgaccacttgcttggccactctccaagttccacagctacaagtgggcctggcggaggcagccggcaccgacaggccagccccctggtgcaccggcgggacagcaaccccttcacggagatcgccatgagctcctgcaagtatagcggtggggtcatgaagcccctcagccgcctcagcgcctcccggaggaacctcatcgaggccgagactgagggccaacccctccagcttttcagccctagcaaccccccggagatcgtcatctcctcccgggaggacaaccatgcccaccagaccctgctccatcaccctaatgccacccacaaccaccagcatgccggcaccaccgccagcagcaccaccttccccaaagccaacaagcggaaaaaccaaaacattggctataagctgggacacaggagggccctgtttgaaaagagaaagcgactgagtgactatgctctgatttttgggatgtttggaattgttgttatggtgatagagaccgagctctcttggggtttgtactcaaaggactccatgttttcgttggccctgaaatgccttatcagtctgtccaccatcatccttttgggcttgatcatcgcctaccacacacgtgaagtccagctcttcgtgatcgacaacggcgcggatgactggcggatagccatgacctacgagcgcatcctgtacatcagcctggagatgctggtgtgcgccatccaccccattcctggcgagtacaagttcttctggacggcacgcctggccttctcctacacaccctcccggccggaggccgatgtggacatcatcctgtctatccccatgttcctgcgcctgtacctgatcgcccgagtcatgctgctgcacagcaagctcttcaccgatgcctcgtcccgcagcgtcggggccctcaacaagatcaacttcaacacccgctttgtcatgaagacgctcatgaccatctgccctggcactgtgctgctcgtgttcagcatctctctgtggatcattgctgcctggaccgtccgtgtctgtgaaaggtaccatgaccagcaggacgtaactagtaactttctgggtgccatgtggctcatctccatcacattcctttccattggttatggggacatggtgccccacacatactgtgggaaaggtgtctgtctcctcactggcatcatgggtgcaggctgcactgcccttgtggtggccgtggtggcccgaaagctggaactcaccaaagcggagaagcacgttcataacttcatgatggacactcagctcaccaagcggatcaagaatgctgcagccaatgtccttcgggaaacatggttaatctataaacacacaaagctgctaaagaagattgaccatgccaaagtgaggaaacaccagaggaagttcctccaagctatccaccagttgaggagcgtcaagatggaacagaggaagctgagtgaccaagccaacactctggtggacctttccaagatgcagaatgtcatgtatgacttaatcacagaactcaatgaccggagcgaagacctggagaagcagattggcagcctggagtcgaagctggagcatctcaccgccagcttcaactccctgccgctgctcatcgccgacaccctgcgccagcagcagcagcagctcctgtctgccatcatcgaggcccggggtgtcagcgtggcagtgggcaccacccacaccccaatctccgatagccccattggggtcagctccacctccttcccgaccccgtacacaagttcaagcagttgctaaataaatctccccactccagaagcattacccataggtcttaagatgcaaatcaactctctcctggtcgctttgccatcaagaaacattcagaccagggaacggaaagaagaga

SEQ ID NO: 71 - DNA, 2139 bp, Homo sapiens
gtgagacaggggtagtgcgaggccgggcacagccttcctgtgtggttttaccgcccagagagcgtcatggacctggggaaaccaatgaaaagcgtgctggtggtggctctccttgtcattttccaggtatgcctgtgtcaagatgaggtcacggacgattacatcggagacaacaccacagtggactacactttgttcgagtctttgtgctccaagaaggacgtgcggaactttaaagcctggttcctccctatcatgtactccatcatttgtttcgtgggcctactgggcaatgggctggtcgtgttgacctatatctatttcaagaggctcaagaccatgaccgatacctacctgctcaacctggcggtggcagacatcctcttcctcctgacccttcccttctgggcctacagcgcggccaagtcctgggtcttcggtgtccacttttgcaagctcatctttgccatctacaagatgagcttcttcagtggcatgctcctacttctttgcatcagcattgaccgctacgtggccatcgtccaggctgtctcagctcaccgccaccgtgcccgcgtccttctcatcagcaagctgtcctgtgtgggcatctggatactagccacagtgctctccatcccagagctcctgtacagtgacctccagaggagcagcagtgagcaagcgatgcgatgctctctcatcacagagcatgtggaggcctttatcaccatccaggtggcccagatggtgatcggctttctggtccccctgctggccatgagcttctgttaccttgtcatcatccgcaccctgctccaggcacgcaactttgagcgcaacaaggccatcaaggtgatcatcgctgtggtcgtggtcttcatagtcttccagctgccctacaatggggtggtcctggcccagacggtggccaacttcaacatcaccagtagcacctgtgagctcagtaagcaactcaacatcgcctacgacgtcacctacagcctggcctgcgtccgctgctgcgtcaaccctttcttgtacgccttcatcggcgtcaagttccgcaacgatctcttcaagctcttcaaggacctgggctgcctcagccaggagcagctccggcagtggtcttcctgtcggcacatccggcgctcctccatgagtgtggaggccgagaccaccaccaccttctccccataggcgactcttctgcctggactagagggacctctcccagggtccctggggtggggatagggagcagatgcaatgactcaggacatccccccgccaaaagctgctcagggaaaagcagctctcccctcagagtgcaagccctgctccagaagttagcttcaccccaatcccagctacctcaaccaatgccgaaaaagacagggctgataagctaacaccagacagacaacactgggaaacagaggctattgtcccctaaaccaaaaactgaaagtgaaagtccagaaactgttcccacctgctggagtgaaggggccaaggagggtgagtgcaaggggcgtgggagtggcctgaagagtcctctgaatgaaccttctggcctcccacagactcaaatgctcagaccagctcttccgaaaaccaggccttatctccaagaccagagatagtggggagacttcttggcttggtgaggaaaagcggacatcagctggtcaaacaaactctctgaacccctccctccatcgttttcttcactgtcctccaagccagcgggaatggcagctgccacgccgccctaaaagcacactcatcccctcacttgccgcgtcgccctcccaggctctcaacaggggagagtgtggtgtttcctgcaggccaggccagctgcctccgcgtgatcaaagccacactctgggctccagagtggggatgacatgcactcagctcttggctccactgggatgggaggagaggacaagggaaatgtcaggggcggggagggtgacagtggccgcccaaggccacgagcttgttctttgttctttgtcacagggactgaaaacctctcctcatgttctgctttcgattcgttaagagagcaacattttacccacacacagataaagttttcccttgaggaaacaacagctttaaaag

SEQ ID NO: 72 - DNA, 1201 bp, Homo sapiens
agggcccccagcagctctgacactgccccgggtgcaatgccgagcctctcggtacccgatcgccgtggattgctcctggaccctgccgcctgctccaaactccaccagccccgtgtccttcattgccacgtacaggctcggcatggctgcccggggccacagctggcctgcctgcagcagacgccaacgtccaccagctgcaccatcacggatgtccagctgttctccatggctccctacgtgctcaatgtcaccgccgtccacccctggggctccagcagcagcttcgtgcctttcataacagagcacatcatcaagcccgaccctccagaaggcgtgcgcctaagccccctcgctgagcgccagctacaggtgcagtgggagcctcccgggtcctggcccttcccagagatcttctcactgaagtactggatccgttacaagcgtcagggagctgcgcgcttccaccgggtggggcccattgaagccacgtccttcatcctcagggctgtgcggccccgagccaggtactacatccaagtggcggctcaggacctcacagactacggggaactgagtgactggagtctccccgccactgccacgatgagcctgggcaagtagcaagggcttcccgctgcctccagacagcacctgggtcctcgccaccctaagccccgggacacctgttggagggcggatgggatctgcctagcctgggctggagtccttgctttgctgctgctgagctgccgggcaacctcagatgaccgacttttccctttgagcctcagtttctctagctgagaaatggagatgtactactctctcctttacctttacctttaccacagtgcagggctgactgaactgtcactgtgagatattttttattgtttaattagaaaagaattgttgttgggctgggcgcagtggatcgcacctgtaatcccagtcactgggtagccgacgtgggagggtagcttgaggccaggagctcgaaaccagtccgggccacacagcaagaccccatctctaaaaaattaatataaatataaaataaattagccaggtgtgatgttgcgcgcccacagtcccaactacttgggaggctgaggtgggaggatcacttgagtccaggaggttaaggctgcagtgagctgtcgtcacaccactgccttcatgcctgggcaacagagca

SEQ ID NO: 73 - DNA, 1161 bp, Homo sapiens
gaattccgcagccatgaccccgcagcttctcctggcccttgtcctctgggccagctgcccgccctgcagtggaaggaaagggcccccagcagctctgacactgccccgggtgcaatgccgagcctctcggtacccgatcgccgtggattgctcctggaccctgccgcctgctccaaactccaccagccccgtgtccttcattgccacgtacaggctcggcatggctgcccggggccacagctggccctgcctgcagcagacgccaacgtccaccagctgcaccatcacggatgtccagctgttctccatggctccctacgtgctcaatgtcaccgccgtccacccctggggctccagcagcagcttcgtgcctttcataacagagcacatcatcaagcccgaccctccagaaggcgtgcgcctaagccccctcgctgagcgccacgtacaggtgcagtgggagcctcccgggtcctggcccttcccagagatcttctcactgaagtactggatccgttacaagcgtcagggagctgcgcgcttccaccgggtggggcccattgaagccacgtccttcatcctcagggctgtgcggccccgagccaggtactacgtccaagtggcggctcaggacctcacagactacggggaactgagtgactggagtctccccgccactgccacaatgagcctgggcaagtagcaagggcttcccgctgcctccagacagcacctgggtcctcgccaccctaagccccgggacacctgttggagggcggatgggatctgcctagcctgggctggagtccttgctttgctgctgctgagctgccgggcaacctcagatgaccgacttttccctttgagcctcagtttctctagctgagaaatggagatgtactactctctcctttacctttacctttaccacagtgcagggctgactgaactgtcactgtgagatattttttattgtttaattagaaaagaattgttgttgggctgggcgcagtggatcgcacctgtaatcccagtcactgggaagccgacgtgggtgggtagcttgaggccaggagctcgaaaccagtccgggccacacagcaagaccccatctctaaaaaattaatataaatataaaataaaaaaaaaaaaaaggaattc

SEQ ID NO: 74 - DNA, 1995 bp, Homo sapiens
gaattccctcgccgctcgctatggcgtcgctcaccgtgaaggcctaccttctgggcaaggaggacgcggcgcgcgagattcgccgcttcagcttctgctgcagccccgagcctgaggcggaagccgaggctgcggcgggtccgggaccctgcgagcggctgctgagccgggtggccgccctgttccccgcgctgcggcctggcggcttccaggcgcactaccgcgatgaggacggggacttggttgccttttccagtgacgaggaattgacaatggccatgtcctacgtgaaggatgacatcttccgaatctacattaaagagaaaaaagagtgccggcgggaccaccgcccaccgtgtgctcaggaggcgccccgcaacatggtgcaccccaatgtgatctgcgatggctgcaatgggcctgtggtaggaacccgctacaagtgcagcgtctgcccagactacgacttgtgtagcgtctgcgagggaaagggcttgcaccgggggcacaccaagctcgcattccccagccccttcgggcacctgtctgagggcttctcgcacagccgctggctccggaaggtgaaacacggacacttcgggtggccaggatgggaaatgggtccaccaggaaactggagcccacgtcctcctcgtgcaggggaggcccgccctggccccacggcagaatcagcttctggtccatcggaggatccgagtgtgaatttcctgaagaacgttggggagagtgtggcagctgcccttagccctctgggcattgaagttgatatcgatgtggagcacggagggaaaagaagccgcctgacccccgtctctccagagagttccagcacagaggagaagagcagctcacagccaagcagctgctgctctgaccccagcaagccgggtgggaatgttgagggcgccacgcagtctctggcggagcagatgaggaagatcgccttggagtccgagggggcccctgaggaacagatggagtcggataactgttcaggaggagatgatgactggacccatctgtcttcaaaagaagtggacccgtctacaggtgaactccagtccctacagatgccagaatccgaagggccaagctctctggacccctcccaggagggacccacagggctgaaggaagctgccttgtacccacatctcccgccagaggctgacccgcggctgattgagtccctctcccagatgctgtccatgggcttctctgatgaaggcggctggctcaccaggctcctgcagaccaagaactatgacatcggagcggctctggacaccatccagtattcaaagcatcccccgccgttgtgaccacttttgcccacctcttctgcgtgcccctcttctgtctcatagttgtgttaagcttgcgtagaattggcaggtctctgtacgggccagtttctctgccttcttccaggatcaggggttagggtgcaagaagccatttagggcagcaaaacaagtgacatgaagggagggtccctgtgtgtgtgtgtgctgatgtttcctgggtgccctggctccttgcagcagggctgggcctgcgagacccaaggctcactgcagcgcgctcctgacccctccctgcaggggctacgttagcagcccagcacatagcttgcctaatggctttcactttctcttttgttttaaatgactcataggtccctgacatttagttgattattttctgctacagacctggtacactctgattttagataaagtaagcctaggtgttgtcagcaggcaggctggggaggccagtgttgtgggcctcctgctgggactgagaaggcccacgaaggcgtccgcaatgttggtttcactgagagctgcctcctggtctcttcaccactgtagttctctcatttccaaaccatcagctgcttttaaaataagatctctttgtagccatcctgttaaatttgtaaacaatctaattaaatggcatgcgcag

SEQ ID NO: 75 - DNA, 1322 bp, Homo sapiens
gccgctgtgtaggaaagaacgtaaagcacttccagagcctgtccggagctcagaggttcggaagacttatcgaccatggagcgcgcgtcctgcttgttgctgctgctgctgccgctggtgcacgtctctgcgaccacgccagaaccttgtgagctggacgatgaagatttccgctgcgtctgcaacttctccgaacctcagcccgactggtccgaagccttccagtgtgtgtctgcagtagaggtggagatccatgccggcggtctcaacctagagccgtttctaaagcgcgtcgatgcggacgcgacccgcggcagtatgctgacacggtcaaggctctccgcgtgcggcggctcacagtgggagcggctaggttcctgctcagctactggtaggcgccctgcgtgtgctagcgtactcccgcctcaaggaactgacgctcgaggacctaaagataaccggcaccatgcctccgctgcctctggaagccacaggacttgcactttccagcttgcgcctacgcaacgtgtcgtgggcgacagggcgttcttggctcgccgagctgcagcagtggctcaagccaggcctcaaggtactgagcattgcccaagcacactcgcctgccttttcctgcgaacaggttcgcgccttcccggcccttaccagcctagacctgtctgacaatcctggactgggcgaacgcggactgatggcggctctctgtccccacaagttcccggccatccagaatctagcgctgcgcaacacaggaatggagacgcccacaggcgtgcgcgcactggcggcggcaggtgtgcagccccacagcctagacctcagccacaactcgctgcgcgccaccgtaaaccctagcgctccgagatgcatgtggtccagcgccctgaactccctcaatctgtcgttcgctgggctggaacaggtgcctaaaggactgccagccaagctcagagtgctcgatctcagctgcaacagactgaacagggcgccgcagcctgacgagctgcccgaggtggataacctgacactggacgggaatcccttcctggtccctggaactgccctcccccacgagggctcaatgaactccggcgtggtcccagcctgtgcacgttcgaccctgtcggtgggggtgtcgggaaccctggtgctgctccaaggggcccggggctttgcctaagatccaagacagaataatgaatggactcaaactgccttggcttcaggggagtcccgtcaggacgttgaggacttttcgaccaattcaaccctttgccccacctttattaaaatcttaaacaacg

SEQ ID NO: 76 - DNA, 1673 bp, Homo sapiens
ggcggttcagccatgaggctggctgtgcttttctcgggggccctgctggggctactggcagcccaggggacagggaatgactgtcctcacaaaaaatcagctactttgctgccatccttcacggtgacacccacggttacagagagcactggaacaaccagccacaggactaccaagagccacaaaaccaccactcacaggacaaccaccacaggcaccaccagccacggacccacgactgccactcacaaccccaccaccaccagccatggaaacgtcacagttcatccaacaagcaatagcactgccaccagccagggaccctcaactgccactcacagtcctgccaccactagtcatggaaatgccacggttcatccaacaagcaacagcactgccaccagcccaggattcaccagttctgcccacccagaaccacctccaccctctccgagtcctagcccaacctccaaggagaccattggagactacacgtggaccaatggttcccagccctgtgtccacctccaagcccagattcagattcgagtcatgtacacaacccagggtggaggagaggcctggggcatctctgtactgaaccccaacaaaaccaaggtccagggaagctgtgagggtgcccatccccacctgcttctctcattcccctatggacacctcagctttggattcatgcaggacctccagcagaaggttgtctacctgagctacatggcggtggagtacaatgtgtccttcccccacgcagcacagtggacattctcggctcagaatgcatcccttcgagatctccaagcacccctggggcagagcttcagttgcagcaactcgagcatcattctttcaccagctgtccacctcgacctgctctccctgaggctccaggctgctcagctgccccacacaggggtctttgggcaaagtttctcctgccccagtgaccggtccatcttgctgcctctcatcatcggcctgatccttcttggcctcctcgccctggtgcttattgctttctgcatcatccggagacgcccatccgcctaccaggccctctgagcatttgcttcaaaccccagggcactgagggggttggggtgtggtgggggggtacccttatttcctcgacacgcaactggctcaaagacaatgttattttccttccctttcttgaagaacaaaaagaaagccgggcatgacggctcatgcctgtaatcccagcactttgggaggctgaggcaggtggatcactggaggtcaggagtttgagaccagcctggccaacatggtgaaaccctgtctctactaaaaatacaattagccaggtgtggcggcgtaatcccagctggcctgtaatcccagctacttgggaggctgaggcagaactgcttgaacccaggaggtggaggttgcagtgagccgtcatcgcgccactaagccaagatcgcgccactgcactccagcctgggcgacagagccagactgtctcaaataaataaatatgagataatgcagtcgggagaagggagggagagaattttattaaatgtgacgaactgcccccccccccccccagcaggagagcagcaaaatttatgcaaatctttgacggggttttccttgtcctgccaggattaaaagccatgagtttcttg

SEQ ID NO: 77 - DNA, 1701 bp, Homo sapiens
agactcaacaagagctccagcaaagactttcactgtagcttgacttgacctgagattaactagggaatcttgagaataaagatgagctctgaaaattgtttcgtagcagagaacagctctttgcatccggagagtggacaagaaaatgatgccaccagtccccatttctcaacacgtcatgaagggtccttccaagttcctgtcctgtgtgctgtaatgaatgtggtcttcatcaccattttaatcatagctctcattgccttatcagtgggccaatacaattgtccaggccaatacacattctcaatgccatcagacagccatgtttcttcatgctctgaggactgggttggctaccagaggaaatgctactttatttctactgtgaagaggagctggacttcagcccaaaatgcttgttctgaacatggtgctactcttgctgtcattgattctgaaaaggacatgaactttctaaaacgatacgcaggtagagaggaacactgggttggactgaaaaaggaacctggtcacccatggaagtggtcaaatggcaaagaatttaacaactggttcaacgttacagggtctgacaagtgtgtttttctgaaaaacacagaggtcagcagcatggaatgtgagaagaatttatactggatatgtaacaaaccttacaaataataaggaaacgtgttcacttattgactattatagaatggaactcaaggaaatctgtgtcagtggatgctgctctgtggtccgaagtcttccatagagactttgtgaaaaaaaattttatagtgtcttgggaattttcttccaaacagaactatggaaaaaaaggaagaaattccaggaaaatctgcactgtgggcttttattgccatgagctagaagcatcacagggtgaccaataaccatgcccaagaatgagaagaatgactatgcaacctttggatgcactttatattattttgaatccagaaataatgaaataactaggcgtggacttactatttattgctgaatgactaccaacagtgagagcccttcatgcatttgcactattggaaggagttagatgttggtactagatactgaatgtaaacaaaggaattatggctggtaacataggtttttagtctaattgaatcccttaaactcagggagcatttataaatggacaaatgcttatgaaattaagatttgtaatatttctctctttttagagaaatttgccaatttactttgttatttttccccaaaaagaatgggatgatcgtgtatttatttttttacttcctcagctgtagacaggtccttttcgatggtacatatttctttgcctttataatcttttatacagtgtcttacagagaaaagacataagcaaagactatgaggaatatttgcaagacatagaatagtgttggaaaatgtgcaatatgtgatgtggcaaatctctattaggaaatattctgtaatcttcagacctagaataatactagtcttataataggtttgtgactttcctaaatcaattctattacgtgcaatacttcaatacttcatttaaaatatttttatgtgcaataaaatgtatttgtttgtattttgtgttcagtacaattataagctgtttttatatatgtgaaataaaagtagaataaacacaaaaaaaaaaaaaaaaaaaaaaaaaaa

SEQ ID NO: 78 - DNA, 4740 bp, Homo sapiens
gaattccgtggttcctcagtggtgcctgcaacccctggttcacctccttccaggttctggctccttccagccatggctctcagagtccttctgttaacagccttgaccttatgtcatgggttcaacttggacactgaaaacgcaatgaccttccaagagaacgcaaggggcttcgggcagagcgtggtccagcttcagggatccagggtggtggttggagccccccaggagatagtggctgccaaccaaaggggcagcctctaccagtgcgactacagcacaggctcatgcgagcccatccgcctgcaggtccccgtggaggccgtgaacatgtccctgggcctgtccctggcagccaccaccagcccccctcagctgctggcctgtggtcccaccgtgcaccagacttgcagtgagaacacgtatgtgaaagggctctgcttcctgtttggatccaacctacggcagcagccccagaagttcccagaggccctccgagggtgtcctcaagaggatagtgacattgccttcttgattgatggctctggtagcatcatcccacatgactttcggcggatgaaggagtttgtctcaactgtgatggagcaattaaaaaagtccaaaaccttgttctctttgatgcagtactctgaagaattccggattcactttaccttcaaagagttccagaacaaccctaacccaagatcactggtgaagccaataacgcagctgcttgggcggacacacacggccacgggcatccgcaaagtggtacgagagctgtttaacatcaccaacggagcccgaaagaatgcctttaagatcctagttgtcatcacggatggagaaaagtttggcgatcccttgggatatgaggatgtcatccctgaggcagacagagagggagtcattcgctacgtcattggggtgggagatgccttccgcagtgagaaatcccgccaagagcttaataccatcgcatccaagccgcctcgtgatcacgtgttccaggtgaataactttgaggctctgaagaccattcagaaccagcttcgggagaagatctttgcgatcgagggtactcagacaggaagtagcagctcctttgagcatgagatgtctcaggaaggcttcagcgctgccatcacctctaatggccccttgctgagcactgtggggagctatgactgggctggtggagtctttctatatacatcaaaggagaaaagcaccttcatcaacatgaccagagtggattcagacatgaatgatgcttacttgggttatgctgccgccatcatcttacggaaccgggtgcaaagcctggttctgggggcacctcgatatcagcacatcggcctggtagcgatgttcaggcagaacactggcatgtgggagtccaacgctaatgtcaagggcacccagatcggcgcctacttcggggcctccctctgctccgtggacgtggacagcaacggcagcaccgacctggtcctcatcggggccccccattactacgagcagacccgagggggccaggtgtccgtgtgccccttgcccagggggcagagggctcggtggcagtgtgatgctgttctctacggggagcagggccaaccctggggccgctttggggcagccctaacagtgctgggggacgtaaatggggacaagctgacggacgtggccattggggccccaggagaggaggacaaccggggtgctgtttacctgtttcacggaacctcaggatctggcatcagcccctcccatagccagcggatagcaggctccaagctctctcccaggctccagtattttggtcagtcactgagtgggggccaggacctcacaatggatggactggtagacctgactgtaggagcccaggggcacgtgctgctgctcaggtcccagccagtactgagagtcaaggcaatcatggagttcaatcccagggaagtggcaaggaatgtatttgagtgtaatgatcaggtggtgaaaggcaaggaagccggagaggtcagagtctgcctccatgtccagaagagcacacgggatcggctaagagaaggacagatccagagtgttgtgacttatgacctggctctggactccggccgcccacattcccgcgccgtcttcaatgagacaaagaacagcacacgcagacagacacaggtcttggggctgacccagacttgtgagaccctgaaactacagttgccgaattgcatcgaggacccagtgagccccattgtgctgcgcctgaacttctctctggtgggaacgccattgtctgctttcgggaacctccggccagtgctggcggaggatgctcagagactcttcacagccttgtttccctttgagaagaattgtggcaatgacaacatctgccaggatgacctcagcatcaccttcagtttcatgagcctggactgcctcgtggtgggtgggccccgggagttcaacgtgacagtgactgtgagaaatgatggtgaggactcctacaggacacaggtcaccttcttcttcccgcttgacctgtcctaccggaaggtgtccacactccagaaccagcgctcacagcgatcctggcgcctggcctgtgagtctgcctcctccaccgaagtgtctggggccttgaagagcaccagctgcagcataaaccaccccatcttcccggaaaactcagaggtcacctttaatatcacgtttgatgtagactctaaggcttcccttggaaacaaactgctcctcaaggccaatgtgaccagtgagaacaacatgcccagaaccaacaaaaccgaattccaactggagctgccggtgaaatatgctgtctacatggtggtcaccagccatggggtctccactaaatatctcaacttcacggcctcagagaataccagtcgggtcatgcagcatcaatatcaggtcagcaacctggggcagaggagcctccccatcagcctggtgttcttggtgcccgtccggctgaaccagactgtcatatgggaccgcccccaggtcaccttctccgagaacctctcgagtacgtgccacaccaaggagcgcttgccctctcactccgactttctggctgagcttcggaaggcccccgtggtgaactgctccatcgctgtctgccagagaatccagtgtgacatcccgttctttggcatccaggaagaattcaatgctaccctcaaaggcaacctctcgtttgactggtacatcaagacctcgcataaccacctcctgatcgtgagcacagctgagatcttgtttaacgattccgtgttcaccctgctgccgggacagggggcgtttgtgaggtcccagacggagaccaaagtggagccgttcgaggtccccaaccccctgccgctcatcgtgggcagctctgtcgggggactgctgctcctggccctcatcaccgccgcgctgtacaagctcggcttcttcaagcggcaatacaaggacatgatgagtgaagggggtcccccgggggccgaaccccagtagcggctccttcccgacagagctgcctctcggtggccagcaggactctgcccagaccacacgtagcccccaggctgctggacacgtcggacagcgaagtatccccgacaggacgggcttgggcttccatttgtgtgtgtgcaagtgtgtatgtgcgtgtgtgcgagtgtgtgcaagtgtctgtgtgcaagtgtgtgcacgtgtgcgtgtgcgtgcatgtgcactcgcacgcccatgtgtgagtgtgtgcaagtatgtgagtgtgtccagtgtgtgtgcgtgtgtccatgtgtgtgcagtgtgtgcatgtgtgcgagtgtgtgcatgtgtgtgctcaggggctgtggctcacgtgtgtgactcagagtgtctctggcgtgtgggtaggtgacggcagcgtagcctctccggcagaagggaactgcctgggctcccttgtgcgtgggtaagccgctgctgggttttcctccgggagaggggacggtcaatcctgtgggtgaagagagagggaaacacagcagcatctctccactgaaagaagtgggacttcccgtcgcctgcgagcctgcggcctgctggagcctgcgcagcttggatggatactccatgagaaaagccgtgggtggaaccaggagcctcctccacaccagcgctgatgcccaataaagatgcccactgaggaatcatgaagcttcctttctggattcatttattatttcaatgtgactttaattttttggatggataagcctgtctatggtacaaaaatcacaaggcattcaagtgtacagtgaaaagtctccctttccagatattcaagtcacctccttaaaggtagtcaagattgtgttttgaggtttccttcagacagattccaggcgatgtgcaagtgtatgcacgtgtgcacacaccacacacatacacacacacaagcttttttacacaaatggtagcatactttatattggtctgtatcttgctttttttcaccaatatttctcagacatcggttcatattaagacataaattactttttcattcttttataccgctgcatagtattccattgtgtgagtgtaccataatgtatttaaccagtcttcttttgatatactattttcatctcttgttattgcatctgctgagttaataaatcaaatatatgtcaaaaaaaaaaaaaaaaaaaaaaaaaaaaaaaaaaaaaaaaa

SEQ ID NO: 79 - DNA, 1414 bp, Homo sapiens
gaattcgcactgctctgagaatttgtgagcagcccctaacaggctgttacttcactacaactgacgatatgatcatcttaatttacttatttctcttgctatgggaagacactcaaggatggggattcaaggatggaatttttcataactccatatggcttgaacgagcagccggtgtgtaccacagagaagcacggtctggcaaatacaagctcacctacgcagaagctaaggcggtgtgtgaatttgaaggcggccatctcgcaacttacaagcagctagaggcagccagaaaaattggatttcatgtctgtgctgctggatggatggctaagggcagagttggataccccattgtgaagccagggcccaactgatgatttggaaaaactggcattattgattatggaatccgtctcaataggagtgaaagatgggatgcctattgctacaacccacacgcaaaggagtgtggtggcgtctttacagatccaaagcgaatttttaaatctccaggcttcccaaatgagtacgaagataaccaaatctgctactggcacattagactcaagtatggtcagcgtattcacctgagttttttagattttgaccttgaagatgacccaggttgcttggctgattatgttgaaatatatgacagttacgatgatgtccatggctttgtgggaagatactgtggagatgagcttccagatgacatcatcagtacaggaaatgtcatgaccttgaagtttctaagtgatgcttcagtgacagctggaggtttccaaatcaaatatgttgcaatggatcctgtatccaaatccagtcaaggaaaaaatacaagtactacttctactggaaataaaaactttttagctggaagatttagccacttataaaaaaaaaaaaggatgatcaaaacacacagtgtttatgttggaatcttttggaactcctttgatctcactgttattattaacatttatttattatttttctaaatgtgaaagaaatacataatttagggaaaattggaaaatataggaaactttaaacgagaaaatgaaacctctcataatcccactgcatagaaataacaagcgttaacattttcatatttttttctttcagtcatttttgtatttgtggtatatgtatatatgtacctatatgtatttgcatttgaaattttggaatcctgctctatgtacagttttgtattatactttttaaatcttgaactttatgaacattttctgaaatcattgattattctacaaaaacatgattttaaacagctgtaaaatattctatgatatgaatgttttatgcattatttaagcctgtctctattgttggaatttcaggtcattttcataaatattgttgcaataaatatccttcggaattc

SEQ ID NO: 80 - DNA, 1589 bp, Homo sapiens
cgagtccccggctcctccagctccttcctcctcttcctcctcctcctccacctccggcttttgggggatcactgtcctctctcggcagcagaatgagccggcaggtggtccgcaccagcaagttccgccacgtgtttggacagccggccaaggccgaccagtgctatgaagatgtgcgcgtctcacagaccacctgggacagtggcttctgtgctgtcaaccctaagtttgtggccctgatctgtgaggccagcgggggaggggccttcctggtgctgcccctgggcaagactggacgtgtggacaagaatgcgcccacggtctgtggccacacagcccctgtgctagacatcgcctggtgcccgcacaatgacaacgtcattgccagtggctccgaggactgcacagtcatggtgtgggagatcccagatgggggcctgatgctgcccctgcgggagcccgtcgtcaccctggagggccacaccaagcgtgtgggcattgtggcctggcacaccacagcccagaacgtgctgctcagtgcaggttgtgacaacgtgatcatggtgtgggacgtgggcactggggcggccatgctgacactgggcccagaggtgcacccagacacgatctacagtgtggactggagccgagatggaggcctcatttgtacctcctgccgtgacaagcgcgtgcgcatcatcgagccccgcaaaggcactgtcgtagctgagaaggaccgtccccacgaggggacccggcccgtgcgtgcagtgttcgtgtcggaggggaagatcctgaccacgggcttcagccgcatgagtgagtggcaggtggcgctgtgggacacaaagcacctggaggagccgctgtccctgcaggagctggacaccagcagcggtgtcctgctgcccttctttgaccctgacaccaacatcgtctacctctgtggcaagggtgacagctcaatccggtactttgagatcacttccgaggcccctttcctgcactatctctccatgttcagttccaaggagtcccagcggggcatgggctacatgcccaaacgtggcctggaggtgaacaagtgtgagatcgccaggttctacaagctgcacgagcggaggtgtgagcccattgccatgacagtgcctcgaaagtcggacctgttccaggaggacctgtacccacccaccgcagggcccgaccctgccctcacggctgaggagtggctggggggtcgggatgctgggcccctcctcatctccctcaaggatggctacgtacccccaaagagccgggagctgagggtcaaccggggcctggacaccgggcgcaggagggcagcaccagaggccagtggcactcccagctcggatgccgtgtctcggctggaggaggagatgcggaagctccaggccacggtgcaggagctccagaagcgcttggacaggctggaggagacagtccaggccaagtagagccccgcagggcctccagcagggtcagacattcacacccatccactcacctcccattcccagccacatgggagagaaaaaaatcataataaaatggctttattttctggt

SEQ ID NO: 81 - DNA, 2007 bp, Homo sapiens
tctgggcacgggtgcaggctgaggagctgcccagagcaccgctcacactcccagagtacctgaagtcggcatttcaatgacaggtgacaagggtccccaaaggctaagcgggtccagctatggttccatctccagcccgaccagcccgaccagcccagggccacagcaagcacctcccagagagacctacctgagtgagaagatccccatcccagacacaaaaccgggcaccttcagcctgcggaagctatgggccttcacggggcctggcttcctcatgagcattgctttcctggacccaggaaacatcgagtcagatcttcaggctggcgccgtggcgggattcaaacttctctgggtgctgctctgggccaccgtgttgggcttgctctgccagcgactggctgcacgtctgggcgtggtgacaggcaaggacttgggcgaggtctgccatctctactaccctaaggtgccccgcaccgtcctctggctgaccatcgagctagccattgtgggctccgacatgcaggaagtcatcggcacggccattgcattcaatctgctctcagctggacgaatcccactctggggtggcgtcctcatcaccatcgtggacaccttcttcttcctcttcctcgataactacgggctgcggaagctggaagctttttttggactccttataaccattatggccttgacctttggctatgagtatgtggtggcgcgtcctgagcagggagcgcttcttcggggcctgttcctgccctcgtgcccgggctgcggccaccccgagctgctgcaggcggtgggcattgttggcgccatcatcatgccccacaacatctacctgcactcggccctggtcaagtctcgagagatagaccgggcccgccgagcggacatcagagaagccaacatgtacttcctgattgaggccaccatcgccctgtccgtctcctttatcatcaacctctttgtcatggctgtctttgggcaggccttctaccagaaaaccaaccaggctgcgttcaacatctgtgccaacagcagcctccacgactacgccaagatcttccccatgaacaacgccaccgtggccgtggacatttaccaggggggcgtgatcctgggctgcctgttcggccccgcggccctctacatctgggccataggtctcctggcggctgggcagagctccaccatgacgggcacctacgcgggacagttcgtgatggagggcttcctgaggctgcggtggtcacgcttcgcccgtgtcctcctcacccgctcctgcgccatcctgcccaccgtgctcgtggctgtcttccgggacctgagggacttgtcgggcctcaatgatctgctcaacgtgctgcagagcctgctgctcccgttcgccgtgctgcccatcctcacgttcaccagcatgcccaccctcatgcaggagtttgccaatggcctgctgaacaaggtcgtcacctcttccatcatggtgctagtctgcgccatcaacctctacttcgtggtcagctatctgcccagcctgccccaccctgcctacttcggccttgcagccttgctggccgcagcctacctgggcctcagcacctacctggtctggacctgttgccttgcccacggagccacctttctggcccacagctcccaccaccacttcctgtatgggctccttgaagaggaccagaaaggggagacctctggctaggcccacaccagggcctggctgggagtggcatgtatgacgtgactggcctgctggatgtggagggggcgcgtgcaggcagcaggatagagtgggacagttcctgagaccagccaacctgggggctttagggacctgctgtttcctagcgcagccatgtgattaccctctgggtctcagtgtcctcatctgtaaaatggagacaccaccacccttgccatggaggttaagcactttaacacagtgtctggcacttgggacaaaaacaaacaaacgaaaaa

SEQ ID NO: 82 - DNA, 500 bp, Homo sapiens
gccatgtcactcctcttgctggtggtctcagcccttcacatcctcattcttatactgcttttcgtggccactttggacaagtcctggtggactctccctgggaaagagtccctgaatctctggtacgactgcacgtggaacaacgacaccaaaacatgggcctgcagtaatgtcagcgagaatggctggctgaaggcggtgcaggtcctcatggtgctctccctcattctctgctgtctctccttcatcctgttcatgttccagctctacaccatgcgacgaggaggtctcttctatgcccaccggctctgccagctttgcaccagcgtggcggtgtttactggcgccttgatctatgccattcacgccgaggagatcctggagaagcacccgcgagggggcagcttcggatactgcttcgccctggcctgggtggccttccccctcgccctggtcagcggcatcatctacatccacctacggaagcgggagtgagcgcc

SEQ ID NO: 83 - DNA, 2257 bp, Homo sapiens
aatcgaaagtagactcttttctgaagcatttcctgggatcagcctgaccacgctccatactgggagaggcttctgggtcaaaggaccagtctgcagagggatcctgtggctggaagcgaggaggctccacacggccgttgcagctaccgcagccaggatctgggcatccaggcacggccatgacccctccgaggctcttctgggtgtggctgctggttgcaggaacccaaggcgtgaatgatggtgacatgcggctggccgatgggggcgccaccaaccagggccgcgtggagatcttctacagaggccagtggggcactgtgtgtgacaacctgtgggacctgactgatgccagcgtcgtctgccgggccctgggcttcgagaacgccacccaggctctgggcagagctgccttcgggcaaggatcaggccccatcatgctggacgaggtccagtgcacgggaaccgaggcctcactggccgactgcaagtccctgggctggctgaagagcaactgcaggcacgagagagacgctggtgtggtctgcaccaatgaaaccaggagcacccacaccctggacctctccagggagctctcggaggcccttggccagatctttgacagccagcggggctgcgacctgtccatcagcgtgaatgtgcagggcgaggacgccctgggcttctgtggccacacggtcatcctgactgccaacctggaggcccaggccctgtggaaggagccgggcagcaatgtcaccatgagtgtggatgctgagtgtgtgcccatggtcagggaccttctcaggtacttctactcccgaaggattgacatcaccctgtcgtcagtcaagtgcttccacaagctggcctctgcctatggggccaggcagctgcagggctactgcgcaagcctctttgccatcctcctcccccaggacccctcgttccagatgcccctggacctgtatgcctatgcagtggccacaggggacgccctgctggagaagctctgcctacagttcctggcctggaacttcgaggccttgacgcaggccgaggcctggcccagtgtccccacagacctgctccaactgctgctgcccaggagcgacctggcggtgcccagcgagctggccctactgaaggccgtggacacctggagctggggggagcgtgcctcccatgaggaggtggagggcttggtggagaagatccgcttccccatgatgctccctgaggagctctttgagctgcagttcaacctgtccctgtactggagccacgaggccctgttccagaagaagactctgcaggccctggaattccacactgtgcccttccagttgctggcccggtacaaaggcctgaacctcaccgaggatacctacaagccccggatttacacctcgcccacctggagtgcctttgtgacagacagttcctggagtgcacggaagtcacaactggtctatcagtccagacgggggcctttggtcaaatattcttctgattacttccaagccccctctgactacagatactacccctaccagtccttccagactccacaacaccccagcttcctcttccaggacaagagggtgtcctggtccctggtctacctccccaccatccagagctgctggaactacggcttctcctgctcctcggacgagctccctgtcctgggcctcaccaagtctggcggctcagatcgcaccattgcctacgaaaacaaagccctgatgctctgcgaagggctcttcgtggcagacgtcaccgatttcgagggctggaaggctgcgattcccagtgccctggacaccaacagctcgaagagcacctcctccttcccctgcccggcagggcacttcaacggcttccgcacggtcatccgccccttctacctgaccaactcctcaggtgtggactagacggcgtggcccaagggtggtgagaaccggagaaccccaggacgccctcactgcaggctcccctcctcggcttccttcctctctgcaatgaccttcaacaaccggccaccagatgtcgccctactcacctgagcgctcagcttcaagaaattactggaaggcttccactagggtccaccaggagttctcccaccacctcaccagtttccaggtggtaagcaccaggacgccctcgaggttgctctgggatccccccacagcccctggtcagtctgcccttgtcactggtctgaggtcattaaaattacattgaggttcct

SEQ ID NO: 84 - DNA, 3984 bp, Homo sapiens
gtcctttcacgcgtgtcttcgtgttggtgcgcttttcactggtcataaagtgctgctcacggccgtgaactgctacagcgtgaaggccgccacccgggtccaggatgcttttgccgccgccaagctcctggccctggccctgatcatcctgctgggcttcgtccagatcgggaagggtgatgtgtccaatctagatcccaagttctcatttgaaggcaccaaactggatgtggggaacattgtgctggcattatacagcggcctctttgcctatggaggatggaattacttgaatttcgtcacagaggaaatgatcaacccctacagaaacctgcccctggccatcatcatctccctgcccatcgtgacgctggtgtacgtgctgaccaacctggcctacttcaccaccctgtccaccgagcagatgctgtcgtccgaggccgtggccgtggacttcgggaactatcacctgggcgtcatgtcctggatcatccccgtcttcgtgggcctgtcctgctttggctccgtcaatgggtccctgttcacatcctccaggctcttcttcgtggggtcccgggaaggccacctgccctccatcctctccatgatccacccacagctcctcacccccgtgccgtccctcgtgttcacgtgtgtgatgacgctgctctacgccttctccaaggacatcttctccgtcatcaacttcttcagcttcttcaactggctctgcgtggccctggccatcatcggcatgatctggctgcgccacagaaagcctgagcttgagcggcccatcaaggtgaacctggccctgcctgtgttcttcatcctggcctgcctcttcctgatcgccgtctccttctggaagacacccgtggagtgtggcatcggcttcaccatcatcctcagcgggctgcccgtctacttcttcggggtctggtggaaaaacaagcccaagtggctcctccagggcatcttctccacgaccgtcctgtgtcagaagctcatgcaggtggtcccccaggagacatagccaggaggccgagtggctgccggaggagcatgcgcagaggccagttaaagtagatcacctcctcgaacccactccggttccccgcaacccacagctcagctgcccatcccagtcctcgccgtccctcccaggtcgggcagtggaggctgctgtgaaaactctggtacgaatctcatccctcaactgagggccagggacccaggtgtgcctgtgctcctgcccaggagcagcttttggtctccttgggccctttttcccttccctcctttgtttacttatatatatattttttttaaacttaaattttgggtcaacttgacaccactaagatgattttttaaggagctgggggaaggcaggagccttcctttctcctgccccaagggcccagaccctgggcaaacagagctactgagacttggaacctcattgctaccacagacttgcactgaagccagacagctgcccagacacatgggcttgtgacattcgtgaaaaccaaccctgtgggcttatgtctctgccttagggtttgcagagtggaaactcagccgtagggtggcactgggagggggtgggggatctgggcaaggtgggtgattcctcccaggaggtgcttgaggccccgatggactcctgaccataatcctagccccgagacaccatcctgagccagggaacagccccagggttggggggtgccggcatctcccctagctcaccaggcctggcctctgggcagtgtggcctcttggctatttctgttccagttttggaggctgagttctggttcatgcagacaaagccctgtccttcagtcttctagaaacagagacaagaaaggcagacacaccgcggccaggcacccatgtgggcgcccaccctgggctccacacagcagtgtcccctgccccagaggtcgcagctaccctcagcctccaatgcattggcctctgtaccgcccggcagccccttctggccggtgctgggttcccactcccggcctaggcacctccccgctctccctgtcacgctcatgtcctgtcctggtcctgatgcccgttgtctaggagacagagccaagcactgctcacgtctctgccgcctgcgtttggaggcccctgggctctcacccagtccccacccgcctgcagagagggaactagggcaccccttgtttctgttgttcccgtgaatttttttcgctatgggaggcagccgaggcctggccaatgcggcccactttcctgagctgtcgctgcctccatggcagcagccaaggacccccagaacaagaagacccccccgcaggatccctcctgagctcggggggctctgccttctcaggccccgggcttcccttctccccagccagaggtggagccaagtggtccagcgtcactccagtgctcagctgtggctggaggagctggcctgtggcacagccctgagtgtcccaagccgggagccaacgaagccggacacggcttcactgaccagcggctgctcaagccgcaagctctcagcaagtgcccagtggagcctgccgcccccacctgggcaccgggaccccctcaccatccagtgggcccggagaaacctgatgaacagtttggggactcaggaccagatgtccgtctctcttgcttgaggaatgaagacctttattcacccctgccccgttgcttcccgctgcacatggacagacttcacagcgtctgctcataggacctgcatccttcctggggacgaattccactcgtccaagggacagcccacggtctggaggccgaggaccaccagcaggcaggtggactgactgtgttgggcaagacctcttccctctgggcctgttctcttggctgcaaataaggacagcagctggtgccccacctgcctggtgcattgctgtgtgaatccaggaggcagtggacatcgtaggcagccacggccccaggtccaggagaagtgctccctggaggcacggaccactgcttcccactggggccggcggggcccacgcacgacgtcagcctcttaccttcccgcctcggctaggggtcctcgggatgccgttctgttccaacctcctgttctgggaggtggacatgcctcaaggatacagggagccggcggcctctcgacggcacgcacttcctgttggctgctgcggctgtgggcgagcatgggggctgccagcgtctgttgtggaaagtagctgctagtgaaatggctggggccgctggggtccgtcttcacactgcgcaggtctcttctgggcgtctgagctggggtgggagctcctccgcagaaggttggtggggggtccagtctgtgatccttggtgctgtgtgccccactccagcctggggaccccacttcagaaggtaggggccgtgtcccgcggtgctgactgaggcctgcttccccctccccctcctgctgtgctggaattccacagggaccagggccaccgcaggggactgtctcagaagacttgatttttccgtccctttttctccacactccactgacaaacgtccccagcggtttccacttgtgggcttcaggtgttttcaagcacaacccaccacaacaagcaagtgcattttcagtcgttgtgcttttttgttttgtgctaacgtcttactaatttaaagatgctgtcggcaccatgtttatttatttccagtggtcatgctcagccttgctgctctgcgtggcgcaggtgccatgcctgctccctgtctgtgtcccagccacgcagggccatccactgtgacgtcggccgaccaggctggacaccctctgccgagtaatgacgtgtgtggctgggaccttctttattctgtgttaatggctaacctgttacactgggctgggttgggtagggtgttctggcttttttgtggggtttttatttttaaagaaacactcaatcatcctag

SEQ ID NO: 85 - DNA, 1322 bp, Homo sapiens
aactcattctgaagaggctgacgattttactgtctcatttttttcctttctccagaatgggttctgggtgggtcccctgggtggtggctctgctagtgaatctgacccgactggattcctccatgactcaaggcacagactctccagaagattttgtgattcaggcaaaggctgactgttacttcaccaacgggacagaaaaggtgcagtttgtggtcagattcatctttaacttggaggagtatgtacgtttcgacagtgatgtggggatgtttgtggcattgaccaagctggggcagccagatgctgagcagtggaacagccggctggatctcttggagaggagcagacaggccgtggatggggtctgtagacacaactacaggctgggcgcacccttcactgtggggagaaaagtgcaaccagaggtgacagtgtacccagagaggaccccactcctgcaccagcataatctgctgcactgctctgtgacaggcttctatccaggggatatcaagatcaagtggttcctgaatgggcaggaggagagagctggggtcatgtccactggccctatcaggaatggagactggacctttcagactgtggtgatgctagaaatgactcctgaacttggacatgtctacacctgccttgtcgatcactccagcctgctgagccctgtttctgtggagtggagagctcagtctgaatattcttggagaaagatgctgagtggcattgcagccttcctacttgggctaatcttccttctggtgggaatcgtcatccagctaagggctcagaaaggatatgtgaggacgcagatgtctggtaatgaggtctcaagagctgttctgctccctcagtcatgctaaggtcctcactaagcttgctctctctggagcctgaagtagtgatgagtagtctgggccctgggtgaggtaaaggacattcatgaggtcaatgttctgggaataactctcttccctgatccttggaggagcccgaactgattctggagctctgtgttctgagatcatgcatctcccacccatctgcccttctcccttctacgtgtacatcattaatccccattgccaagggcattgtccagaaactcccctgagaccttactccttccagccccaaatcatttacttttctgtggtccagccctactcctataagtcatgatctccaaagctttctgtcttccaactgcagtctccacagtcttcagaagacaaatgctcaggtagtcactgtttccttttcactgtttttaaaaaccttttattgtcaaataaaatggagataca

SEQ ID NO: 86 - DNA, 2218 bp, Homo sapiens
cctcgccgcatccactctccggccggccgcctgcccgccgcctcctccgtgcgcccgccagcctcgcccgcgccgtcaccatgagccaggcctactcgtccagccagcgcgtgtcctcctaccgccgcaccttcggcggcgccccgggcttcccgctcggctccccgctgagctcgcccgtgttcccgcgggcgggtttcggctctaagggctcctccagctcggtgacgtcccgcgtgtaccaggtgtcgcgcacgtcgggcggggccgggggcctggggtcgctgcgggccagccggctggggaccacccgcacgccctcctcctacggcgcaggcgagctgctggacttctcactggccgacgcggtgaaccaggagtttctgaccacgcgcaccaacgagaaggtggagctgcaggagctcaatgaccgcttcgccaactacatcgagaaggtgcgcttcctggagcagcagaacgcgctcgccgccgaagtgaaccggctcaagggccgcgagccgacgcgagtggccgagctctacgaggaggagctgcgggagctgcggcgccaggtggaggtgctcactaaccagcgcgcgcgcgtcgacgtcgagcgcgacaacctgctcgacgacctgcagcggctcaaggccaagctgcaggaggagattcagttgaaggaagaagcagagaacaatttggctgccttccgagcggacgtggatgcagctactctagctcgcattgacctggagcgcagaattgaatctctcaacgaggagatcgcgttccttaagaaagtgcatgaagaggagatccgtgagttgcaggctcagcttcaggaacagcaggtccaggtggagatggacatgtctaagccagacctcactgccgccctcagggatatccgggctcagtatgagaccatcgcggctaagaacatttctgaagctgaggagtggtacaagtcgaaggtgtcagacctgacccaggcagccaacaagaacaacgacgccctgcgccaggccaagcaggagatgatggaataccgacaccagatccagtcctacacctgcgagattgacgccctcaagggcactaacgattccctgatgaggcagatgcgggaattggaggaccgatttgccagtgaggccagtggctaccaggacaacattgcgcgcctggaggaagaaatccggcacctcaaggatgagatggcccgccatctgcgcgagtaccaggacctgctcaacgtgaagatggccctggatgtggagattgccacctaccggaagctgctggagggagaggagagccggatcaatctccccatccagacctactctgccctcaacttccgagaaaccagccctgagcaaaggggttctgaggtccataccaagaagacggtgatgatcaagaccatcgagacacgggatggggaggtcgtcagtgaggcgacacagcagcagcatgaagtgctctaaagacgagagaccctctgccaccagagaccgtcctcacccctgtcctcactgctccctgaagcccagccttcttccatcccaggacaccacacccagcctcagtcctcccgtcacagcctctgacccctcctcactggccatccctcgtggtccccaacagcgacatagcccatccctgcctggtcacaggcatgccccggccacctctgcggaccccagctgtgagccttggctgttggcagtgagtgagcctggctcttgtgctggatggagcccaggcgggagcggtggccctgtccctcccacctctgtgacctgaggcctacgctttggctctggagatagccccagagcagggtgttgggatactgcagggccaggactgagccccgcagacctccccagcccctagcccaggagagagaaagccaggcaggtagcctgggggactagccctgtggagactggggggcttgaaattgtccccgtggtctcttactttcctttccccagcccagggtggacttagaaagcaggggctacaagagggaatccccgaaggtgctggaggtgggagcaggagattgagaaggagagaaagtgggtgagatgctggagaagagagaggaggagagaggcagagagcggtctgaggctggtgggaggggcgcccacctccccacgccctccccccccctgctgcaggggctctggagagaaacaataaa

SEQ ID NO: 87 - DNA, 1517 bp, Homo sapiens
ggacgtggatgcagctactctagctcgcattgacctggagcgcagaattgaatctctcaacgaggagatcgcgttccttaagaaagtgcatgaagaggagatccgtgagttgcaggctcagcttcaggaacagcaggtccaggtggagatggacatgtctaagccagacctcactgccgccctcagggacatccgggctcagtatgagaccatcgcggctaagaacatttctgaagctgaggagtggtacaagtcgaaggtgtcagacctgacccaggcagccaacaagaacaacgacgccctgcgccaggccaagcaggagatgatggaataccgacaccagatccagtcctacacctgcgagattgacgccctgaagggcactaacgattccctgatgaggcagatgcgggaattggaggaccgatttgccagtgaggccagtggctaccaggacaacattgcgcgcctggaggaggaaatccggcacctcaaggatgagatggcccgccatctgcgcgagtaccaggacctgctcaacgtgaagatggccctggatgtggagattgccacctaccggaagctgctggagggagaggagagccggatcaatctccccatccagacctactctgccctcaacttccgagaaaccagccctgagcaaaggggttctgaggtccataccaagaagacggtgatgatcaagaccatcgagacacgggatggggaggtcgtcagtgaggccacacagcagcagcatgaagtgctctaaagacagagaccctctgccaccagagaccgtcctcacccctgtcctcactgctccctgaagccagccttcttccatcccaggacaccacacccagcctcagtcctcccctcacagcctctgacccctcctcactggccatccctcgtggtccccaacagcgacatagcccatccctgcctggtcacagggcatgccccggccacctctgcggaccccagctgtgagccttggctgttggcagtgagtgagcctggctcttgtgctggatggagcccaggcgggagcggtggccctgtccctcccacctctgtgacctcaggcactagcctttggctctggagacagccccagagcagggtgttgggatactgcagggccaggactgagccccgcagacctccccagcccctagcccaggagagagaaagccaggcaggtagccagggggactagcccctgtggagactggggggcttgaaattgtccccgtggtctcttactttcctttccccagcccagggtggacttagaaagcaggggctacaagagggaatccccgaaggtgctggaggtgggagcaggagattgagaaggagagaaagtgggtgagatgctggagaagagaggagaggagagaggcagagagcggtctcaggctggtgggaggggcgcccacctccccacgccctcccctcccctgctgcaggggctctggagagaaacaataaagagattcacacac

SEQ ID NO: 88 - DNA, 7680 bp, Homo sapiens
gaagagcaagaggcaggctcagcaaatggttcagccccagtccccggtggctgtcagtcaaagcaagcccggttgttatgacaatggaaaacactatcagataaatcaacagtgggagcggacctacctaggtaatgtgttggtttgtacttgttatggaggaagccgaggttttaactgcgaaagtaaacctgaagctgaagagacttgctttgacaagtacactgggaacacttaccgagtgggtgacacttatgagcgtcctaaagactccatgatctgggactgtacctgcatcggggctgggcgagggagaataagctgtaccatcgcaaaccgctgccatgaagggggtcagtcctacaagattggtgacacctggaggagaccacatgagactggtggttacatgttagagtgtgtgtgtcttggtaatggaaaaggagaatggacctgcaagcccatagctgagaagtgttttgatcatgctgctgggacttcctatgtggtcggagaaacgtgggagaagccctaccaaggctggatgatggtagattgtacttgcctgggagaaggcagcggacgcatcacttgcacttctagaaatagatgcaacgatcaggacacaaggacatcctatagaattggagacacctggagcaagaaggataatcgaggaaacctgctccagtgcatctgcacaggcaacggccgaggagagtggaagtgtgagaggcacacctctgtgcagaccacatcgagcggatctggccccttcaccgatgttcgtgcagctgtttaccaaccgcagcctcacccccagcctcctccctatggccactgtgtcacagacagtggtgtggtctactctgtggggatgcagtggttgaagacacaaggaaataagcaaatgctttgcacgtgcctgggcaacggagtcagctgccaagagacagctgtaacccagacttacggtggcaacttaaatggagagccatgtgtcttaccattcacctacaatggcaggacgttctactcctgcaccacggaagggcgacaggacggacatctttggtgcagcacaacttcgaattatgagcaggaccagaaatactctttctgcacagaccacactgttttggttcagactcaaggaggaaattccaatggtgccttgtgccacttccccttcctatacaacaaccacaattacactgattgcacttctgagggcagaagagacaacatgaagtggtgtgggaccacacagaactatgatgccgaccagaagtttgggttctgccccatggctgcccacgaggaaatctgcacaaccaatgaaggggtcatgtaccgcattggagatcagtgggataagcagcatgacatgggtcacatgatgaggtgcacgtgtgttgggaatggtcgtggggaatggacatgcattgcctactcgcaacttcgagatcagtgcattgttgatgacatcacttacaatgtgaacgacacattccacaagcgtcatgaagaggggcacatgctgaactgtacatgcttcggtcagggtcggggcaggtggaagtgtgatcccgtcgaccaatgccaggattcagagactgggacgttttatcaaattggagattcatgggagaagtatgtgcatggtgtcagataccagtgctactgctatggccgtggcattggggagtggcattgccaacctttacagacctatccaagctcaagtggtcctgtcgaagtatttatcactgagactccgagtcagcccaactcccaccccatccagtggaatgcaccacagccatctcacatttccaagtacattctcaggtggagacctaaaaattctgtaggccgttggaaggaagctaccataccaggccacttaaactcctacaccatcaaaggcctgaagcctggtgtggtatacgagggccagctcatcagcatccagcagtacggccaccaagaagtgactcgctttgacttcaccaccaccagcaccagcacacctgtgaccagcaacaccgtgacaggagagacgactcccttttctcctcttgtggccacttctgaatctgtgaccgaaatcacagccagtagctttgtggtctcctgggtctcagcttccgacaccgtgtcgggattccgggtggaatatgagctgagtgaggagggagatgagccacagtacctggatcttccaagcacagccacttctgtgaacatccctgacctgcttcctggccgaaaatacattgtaaatgtctatcagatatctgaggatggggagcagagtttgatcctgtctacttcacaaacaacagcgcctgatgcccctcctgacccgactgtggaccaagttgatgacacctcaattgttgttcgctggagcagaccccaggctcccatcacagggtacagaatagtctattcgccatcagtagaaggtagcagcacagaactcaaccttcctgaaactgcaaactccgtcaccctcagtgacttgcaacctggtgttcagtataacatcactatctatgctgtggaagaaaatcaagaaagtacacctgttgtcattcaacaagaaaccactggcaccccacgctcagatacagtgccctctcccagggacctgcagtttgtggaagtgacagacgtgaaggtcaccatcatgtggacaccgcctgagagtgcagtgaccggctaccgtgtggatgtgatccccgtcaacctgcctggcgagcacgggcagaggctgcccatcagcaggaacacctttgcagaagtcaccgggctgtcccctggggtcacctattacttcaaagtctttgcagtgagccatgggagggagagcaagcctctgactgctcaacagacaaccaaactggatgctcccactaacctccagtttgtcaatgaaactgattctactgtcctggtgagatggactccacctcgggcccagataacaggataccgactgaccgtgggccttacccgaagaggccagcccaggcagtacaatgtgggtccctctgtctccaagtaccccctgaggaatctgcagcctgcatctgagtacaccgtatccctcgtggccataaagggcaaccaagagagccccaaagccactggagtctttaccacactgcagcctgggagctctattccaccttacaacaccgaggtgactgagaccaccatcgtgatcacatggacgcctgctccaagaattggttttaagctgggtgtacgaccaagccagggaggagaggcaccacgagaagtgacttcagactcaggaagcatcgttgtgtccggcttgactccaggagtagaatacgtctacaccatccaagtcctgagagatggacaggaaagagatgcgccaattgtaaacaaagtggtgacaccattgtctccaccaacaaacttgcatctggaggcaaaccctgacactggagtgctcacagtctcctgggagaggagcaccaccccagacattactggttatagaattaccacaacccctacaaacggccagcagggaaattctttggaagaagtggtccatgctgatcagagctcctgcacttttgataacctgagtcccggcctggagtacaatgtcagtgtttacactgtcaaggatgacaaggaaagtgtccctatctctgataccatcatcccagctgttcctcctcccactgacctgcgattcaccaacattggtccagacaccatgcgtgtcacctgggctccacccccatccattgatttaaccaacttcctggtgcgttactcacctgtgaaaaatgaggaagatgttgcagagttgtcaatttctccttcagacaatgcagtggtcttaacaaatctcctgcctggtacagaatatgtagtgagtgtctccagtgtctacgaacaacatgagagcacacctcttagaggaagacagaaaacaggtcttgattccccaactggcattgacttttctgatattactgccaactcttttactgtgcactggattgctcctcgagccaccatcactggctacaggatccgccatcatcccgagcacttcagtgggagacctcgagaagatcgggtgccccactctcggaattccatcaccctcaccaacctcactccaggcacagagtatgtggtcagcatcgttgctcttaatggcagagaggaaagtcccttattgattggccaacaatcaacagtttctgatgttccgagggacctggaagttgttgctgcgacccccaccagcctactgatcagctgggatgctcctgctgtcacagtgagatattacaggatcacttacggagaaacaggaggaaatagccctgtccaggagttcactgtgcctgggagcaagtctacagctaccatcagcggccttaaacctggagttgattataccatcactgtgtatgctgtcactggccgtggagacagccccgcaagcagcaagccaatttccattaattaccgaacagaaattgacaaaccatcccagatgcaagtgaccgatgttcaggacaacagcattagtgtcaagtggctgccttcaagttcccctgttactggttacagagtaaccaccactcccaaaaatggaccaggaccaacaaaaactaaaactgcaggtccagatcaaacagaaatgactattgaaggcttgcagcccacagtggagtatgtggttagtgtctatgctcagaatccaagcggagagagtcagcctctggttcagactgcagtaaccaacattgatcgccctaaaggactggcattcactgatgtggatgtcgattccatcaaaattgcttgggaaagcccacaggggcaagtttccaggtacagggtgacctactcgagccctgaggatggaatccatgagctattccctgcacctgatggtgaagaagacactgcagagctgcaaggcctcagaccgggttctgagtacacagtcagtgtggttgccttgcacgatgatatggagagccagcccctgattggaacccagtccacagctattcctgcaccaactgacctgaagttcactcaggtcacacccacaagcctgagcgcccagtggacaccacccaatgttcagctcactggatatcgagtgcgggtgacccccaaggagaagaccggaccaatgaaagaaatcaaccttgctcctgacagctcatccgtggttgtatcaggacttatggtggccaccaaatatgaagtgagtgtctatgctcttaaggacactttgacaagcagaccagctcagggtgttgtcaccactctggagaatgtcagcccaccaagaagggctcgtgtgacagatgctactgagaccaccatcaccattagctggagaaccaagactgagacgatcactggcttccaagttgatgccgttccagccaatggccagactccaatccagagaaccatcaagccagatgtcagaagctacaccatcacaggtttacaaccaggcactgactacaagatctacctgtacaccttgaatgacaatgctcggagctcccctgtggtcatcgacgcctccactgccattgatgcaccatccaacctgcgtttcctggccaccacacccaattccttgctggtatcatggcagccgccacgtgccaggattaccggctacatcatcaagtatgagaagcctgggtctcctcccagagaagtggtccctcggccccgccctggtgtcacagaggctactattactggcctggaaccgggaaccgaatatacaatttatgtcattgccctgaagaataatcagaagagcgagcccctgattggaaggaaaaagacagacgagcttccccaactggtaacccttccacaccccaatcttcatggaccagagatcttggatgttccttccacagttcaaaagacccctttcgtcacccaccctgggtatgacactggaaatggtattcagcttcctggcacttctggtcagcaacccagtgttgggcaacaaatgatctttgaggaacatggttttaggcggaccacaccgcccacaacggccacccccataaggcataggccaagaccatacccgccgaatgtaggacaagaagctctctctcagacaaccatctcatgggccccattccaggacacttctgagtacatcatttcatgtcatcctgttggcactgatgaagaacccttacagttcagggttcctggaacttctaccagtgccactctgacaggcctcaccagaggtgccacctacaacatcatagtggaggcactgaaagaccagcagaggcataaggttcgggaagaggttgttaccgtgggcaactctgtcaacgaaggcttgaaccaacctacggatgactcgtgctttgacccctacacagtttcccattatgccgttggagatgagtgggaacgaatgtctgaatcaggctttaaactgttgtgccagtgcttaggctttggaagtggtcatttcagatgtgattcatctagatggtgccatgacaatggtgtgaactacaagattggagagaagtgggaccgtcagggagaaaatggccagatgatgagctgcacatgtcttgggaacggaaaaggagaattcaagtgtgaccctcatgaggcaacgtgttacgatgatgggaagacataccacgtaggagaacagtggcagaaggaatatctcggtgccatttgctcctgcacatgctttggaggccagcggggctggcgctgtgacaactgccgcagacctgggggtgaacccagtcccgaaggcactactggccagtcctacaaccagtattctcagagataccatcagagaacaaacactaatgttaattgcccaattgagtgcttcatgcctttagatgtacaggctgacagagaagattcccgagagtaaatcatctttccaatccagaggaacaagcatgtctctctgccaagatccatctaaactggagtgatgttagcagacccagcttagagttcttctttctttcttaagccctttgctctggaggaagttctccagcttcagctcaactcacagcttctccaagcatcaccctgggagtttcctgagggttttctcataaatgagggctgcacattgcctgttctgcttcgaagtattcaataccgctcagtattttaaatgaagtgattctaagatttggtttgggatcaataggaaagcatatgcagccaaccaagatgcaaatgttttgaaatgatatgaccaaaattttaagtaggaaagtcacccaaacacttctgctttcacttaagtgtctggcccgcaatactgtaggaacaagcatgatcttgttactgtgatattttaaatatccacagtactcactttttccaaatgatcctagtaattgcctagaaatatctttctcttacctgttatttatcaatttttcccagtatttttatacggaaaaaattgtattgaaaacacttagtatgcagttgataagaggaatttggtataattatggtgggtgattattttttatactgtatgtgccaaagctttactactgtggaaagacaactgttttaataaaagatttacattccaca

SEQ ID NO: 89 - DNA, 3936 bp, Homo sapiens
gggaccggcgctcagctggcggcgcgctcgccggccgaggtgggatcccgaggcctctccagtccgccgagggcgcaccaccggcccgtctcgcccgccgcgccggggaggtggagcacgagcgcacgtgttaggaacctagaaagattgtacaatgaatggtgattctcgtgctgcggtggtgacctcaccacccccgaccacagcccctcacaaggagaggtacttcgaccgagtagatgagaacaacccagagtacttgagggagaggaacatggcaccagaccttcgccaggacttcaacatgatggagcaaaagaagagggtgtccatgattctgcaaagccctgctttctgtgaagaattggaatcaatgatacaggagcaatttaagaaggggaagaaccccacaggcctattggcattacagcagattgcagattttatgaccacgaatgtaccaaatgtctacccagcagctccgcaaggagggatggctgccttaaacatgagtcttggtatggtgactcctgtgaacgatcttagaggatctgattctattgcgtatgacaaaggagagaagttattacggtgtaaattggcagcgttttatagactagcagatctctttgggtggtctcagcttatctacaatcatatcacaaccagagtgaactccgagcaggaacacttcctcattgtcccttttgggcttctttacagtgaagtgactgcatccagtttggttaagatcaatctacaaggagatatagtagatcgtggaagcactaatctgggagtgaatcaggccggcttcaccttacactctgcaatttatgctgcacgcccggacgtgaagtgcgtcgtgcacattcacaccccagcaggggctgcggtctctgcaatgaaatgtggcctcttgccaatctccccggaggcgctttcccttggagaagtggcttatcatgactaccatggcattctggttgatgaagaggaaaaagttttgattcagaaaaatctggggcctaaaagcaaggttcttattctccggaaccatgggctcgtgtcagttggagagagcgttgaggaggccttctattacatccataaccttgtggttgcctgtgagatccaggttcgaactctggccagtgcaggaggaccagacaacttagtcctgctgaatcctgagaagtacaaagccaagtcccgttccccagggtctccggtaggggaaggcactggatcgcctcccaagtggcagattggtgagcaggaatttgaagccctcatgcggatgctcgataatctgggctacagaactggctacccttatcgataccctgctctgagagagaagtctaaaaaatacagcgatgtggaggttcctgctagtgtcacaggttactcctttgctagtgacggtgattcgggcacttgctccccactcagacacagttttcagaagcagcagcgggagaagacaagatggctgaactctggccggggcgacgaagcttccgaggaagggcagaatggaagcagtcccaagtcgaagactaagtggactaaagaggatggacatagaacttccacctctgctgtccctaacctgtttgttccattgaacactaacccaaaagaggtccaggagatgaggaacaagatccgagagcagaatttacaggacattaagacggctggccctcagtcccaggttttgtgtggtgtagtgatggacaggagcctcgtccagggagagctggtgacggcctccaaggccatcattgaaaaggagtaccagccccacgtcattgtgagcaccacgggccccaaccccttcaccacactcacagaccgtgagctggaggagtaccgcagggaggtggagaggaagcagaagggctgtgaagagaatctggacgaggctagagaacagaaagaaaagagtcctccagaccagcctgcggtcccccacccgcctcccagcactcccatcaagctggaggaagaccttgtgccggagccgactactggagatgacagtgatgctgccacctttaagccaactctccccgatctgtcccctgatgaaccttcagaagcactcggcttcccaatgttagagaaggaggaggaagcccatagacccccaagccccactgaggcccctactgaggccagccccgagccagccccagacccagccccggtggctgaagaggctgccccctcagctgtcgaggagggggccgccgcggaccctggcagcgatgggtctccaggcaagtccccgtccaaaaagaagaagaagttccgtaccccgtcctttctgaagaagagcaagaagaagagtgactcctgaaagccctgcgctaacactgtcctgtccggagcgaccctggctctgccagcgtccccggccacgtctgtgctctgtccttgtgtaatggaatgcaaaaaagccaagccctccgcctagaggtcccctcacgtgaccagccccgtgtagccccgggctgacccagtgtgtgctcagcagccccaccccaccctgccccttgtcctctcagagcctcagcttctgggggagacatgctctccccacaggggggaggcactaagtcatggtcctggctggaaggtactgaaggcttctgcagctttggctgcacgtcaccctcctgagcctcacctttcctgccgtccctcctgttgtgaaatcaccacattctgtctctgcttggcttcccctccaccctaaagtctcaggtgacggactcagactcctggcttcatgtggcattctctctgctcagtgatctcacttaaatctatatacaaagccttggtcccgtgaaaacactcgtgtgcccaccagcggccttgaagaggcaggtctgggccagatgctgggcaggaaaccccagcggcagatgggcctgtgtgcacccaacgtgatgctatgcatgtctgaccgacgatccctcgaccagaatcagattcaggagctcagtttctttttcacttgggtctctggattcctgtcatagggaaggtatatcaggaggggaagaggcctttctagaattttctttgagcaggtttacaatttagcttacatttttcgactgtgaacgtgaataggctgctttttgctttcttctttccagaccccacagtagagcacttttcacttatttgggggaggcttcaggggactgttctcaccttaactcagccagaaagatgccctagttgtgatcaaaggtaactcgaggtggagggtagccctggggcccctcgacatcaccgtcattgatggagcctgaaccgtgtgctcctcggcagatgctgttgttgttacttccctccaagaggctggaaaagggctcagagctgctgagcaggaaccggagggtgacccatttcaggaggtgccggtaccagcctgactaggtacaggcaagcttgtgtgggcccaacaggcccttggtagagctggtgccagatgtgggctcagatcctgggcatgatgggccgagccacctcggatcccactgattggccagccgagcgagaaccaggctgctgcatggcactgaccgccgcttccagcttcctctgagccgcagggcctgctacgcgggcaagcgtgctgcctctcttctgtgtcgttttgttgccaaggcagaatgaaaagtccttaaccgtggactcttcctttatcccctcctttaccccacatatgcaatgacttttaattttcacttttgtagtttaatcctttgtattacaacatgaaatatagttgcatatatggacaccgacttgggaggacaggtcctgaatgtcctttctccagtgtaacatgttttactcacaaataaaattctttcagcaaaaaaaaaaaaaaaaaaaaaaaaaaaaaaa

SEQ ID NO: 90 - DNA, 4004 bp, Homo sapiens
gcacccaggtcgggcggtgggggcgagcggaggggctgaggggcggagaggcctggcgggccgctgctgcgggccaggggacgggggcggagccggagccggagccgacgggcggtggccgcactgggaccccggaatcccgcgcgctgcccacgattcgcttctgaggaacctagaaagattgtacaatgaatggtgattctcgtgctgcggtggtgacctcaccacccccgaccacagcccctcacaaggagaggtacttcgaccgagtagatgagaacaacccagagtacttgagggagaggaacatggcaccagaccttcgccaggacttcaacatgatggagcaaaagaagagggtgtccatgattctgcaaagccctgctttctgtgaagaattggaatcaatgatacaggagcaatttaagaaggggaagaaccccacaggcctattggcattacagcagattgcagattttatgaccacgaatgtaccaaatgtctacccagcagctccgcaaggagggatggctgccttaaacatgagtcttggtatggtgactcctgtgaacgatcttagaggatctgattctattgcgtatgacaaaggagagaagttattacggtgtaaattggcagcgttttatagactagcagatctctttgggtggtctcagcttatctacaatcatatcacaaccagagtgaactccgagcaggaacacttcctcattgtcccttttgggcttctttacagtgaagtgactgcatccagtttggttaagatcaatctacaaggagatatagtagatcgtggaagcactaatctgggagtgaatcaggccggcttcaccttacactctgcaatttatgctgcacgcccggacgtgaagtgcgtcgtgcacattcacaccccagcaggggctgcggtctctgcaatgaaatgtggcctcttgccaatctccccggaggcgctttcccttggagaagtggcttatcatgactaccatggcattctggttgatgaagaggaaaaagttttgattcagaaaaatctggggcctaaaagcaaggttcttattctccggaaccatgggctcgtgtcagttggagagagcgttgaggaggccttctattacatccataaccttgtggttgcctgtgagatccaggttcgaactctggccagtgcaggaggaccagacaacttagtcctgctgaatcctgagaagtacaaagccaagtcccgttccccagggtctccggtaggggaaggcactggatcgcctcccaagtggcagattggtgagcaggaatttgaagccctcatgcggatgctcgataatctgggctacagaactggctacccttatcgataccctgctctgagagagaagtctaaaaaatacagcgatgtggaggttcctgctagtgtcacaggttactcctttgctagtgacggtgattcgggcacttgctccccactcagacacagttttcagaagcagcagcgggagaagacaagatggctgaactctggccggggcgacgaagcttccgaggaagggcagaatggaagcagtcccaagtcgaagactaagtggactaaagaggatggacatagaacttccacctctgctgtccctaacctgtttgttccattgaacactaacccaaaagaggtccaggagatgaggaacaagatccgagagcagaatttacaggacattaagacggctggccctcagtcccaggttttgtgtggtgtagtgatggacaggagcctcgtccagggagagctggtgacggcctccaaggccatcattgaaaaggagtaccagccccacgtcattgtgagcaccacgggccccaaccccttcaccacactcacagaccgtgagctggaggagtaccgcagggaggtggagaggaagcagaagggctctgaagagaatctggacgaggctagagaacagaaagaaaagagtcctccagaccagcctgcggtcccccacccgcctcccagcactcccatcaagctggaggaaggagacggatgcgctagagagtacctgttaccctaaccttgtgccggagccgactactggagatgacagtgatgctgccacctttaagccaactctccccgatctgtcccctgatgaaccttcagaagcactcggcttcccaatgttagagaaggaggaggaagcccatagacccccaagccccactgaggcccctactgaggccagccccgagccagccccagacccagccccggtggctgaagaggctgccccctcagctgtcgaggagggggccgccgcggaccctggcagcgatgggtctccaggcaagtccccgtccaaaaagaagaagaagttccgtaccccgtcctttctgaagaagagcaagaagaagagtgactcctgaaagccctgcgctaacactgtcctgtccggagcgaccctggctctgccagcgtccccggccacgtctgtgctctgtccttgtgtaatggaatgcaaaaaagccaagccctccgcctagaggtcccctcacgtgaccagccccgtgtagccccgggctgacccagtgtgtgctcagcagccccaccccaccctgccccttgtcctctcagagcctcagcttctgggggagacatgctctccccacaggggggaggcactaagtcatggtcctggctggaaggtactgaaggcttctgcagctttggctgcacgtcaccctcctgagcctcacctttcctgccgtccctcctgttgtgaaatcaccacattctgtctctgcttggcttcccctccaccctaaagtctcaggtgacggactcagactcctggcttcatgtggcattctctctgctcagtgatctcacttaaatctatatacaaagccttggtcccgtgaaaacactcgtgtgcccaccagcggccttgaagaggcaggtctgggccagatgctgggcaggaaaccccagcggcagatgggcctgtgtgcacccaacgtgatgctatgcatgtctgaccgacgatccctcgaccagaatcagattcaggagctcagtttctttttcacttgggtctctggattcctgtcatagggaaggtatatcaggaggggaagaggcctttctagaattttctttgagcaggtttacaatttagcttacatttttcgactgtgaacgtgaataggctgctttttgctttcttctttccagaccccacagtagagcacttttcacttatttgggggaggcttcaggggactgttctcaccttaactcagccagaaagatgccctagttgtgatcaaaggtaactcgaggtggagggtagccctggggcccctcgacatcaccgtcattgatggagcctgaaccgtgtgctcctcggcagatgctgttgttgttacttccctccaagaggctggaaaagggctcagagctgctgagcaggaaccggagggtgacccatttcaggaggtgccggtaccagcctgactaggtacaggcaagcttgtgtgggcccaacaggcccttggtagagctggtgccagatgtgggctcagatcctgggcatgatgggccgagccacctcggatcccactgattggccagccgagcgagaaccaggctgctgcatggcactgaccgccgcttccagcttcctctgagccgcagggcctgctacgcgggcaagcgtgctgcctctcttctgtgtcgttttgttgccaaggcagaatgaaaagtccttaaccgtggactcttcctttatcccctcctttaccccacatatgcaatgacttttaattttcacttttgtagtttaatcctttgtattacaacatgaaatatagttgcatatatggacaccgacttgggaggacaggtcctgaatgtcctttctccagtgtaacatgttttactcacaaataaaattctttcagcaaaaaaaaaaaaaaaaaaaaaaaaaaaaaaa

SEQ ID NO: 91 - DNA, 4204 bp, Homo sapiens
caggacagggaagagcgggcgctatggggagccggacgccagagtcccctctccacgccgtgcagctgcgctggggcccccggcgccgacccccgctcgtgccgctgctgttgctgctcgtgccgccgccacccagggtcgggggcttcaacttagacgcggaggccccagcagtactctcggggcccccgggctccttcttcggattctcagtggagttttaccggccgggaacagacggggtcagtgtgctggtgggagcacccaaggctaataccagccagccaggagtgctgcagggtggtgctgtctacctctgtccttggggtgccagccccacacagtgcacccccattgaatttgacagcaaaggctctcggctcctggagtcctcactgtccagctcagagggagaggagcctgtggagtacaagtccttgcagtggttcggggcaacagttcgagcccatggctcctccatcttggcatgcgctccactgtacagctggcgcacagagaaggagccactgagcgaccccgtgggcacctgctacctctccacagataacttcacccgaattctggagtatgcaccctgccgctcagatttcagctgggcagcaggacagggttactgccaaggaggcttcagtgccgagttcaccaagactggccgtgtggttttaggtggaccaggaagctatttctggcaaggccagatcctgtctgccactcaggagcagattgcagaatcttattaccccgagtacctgatcaacctggttcaggggcagctgcagactcgccaggccagttccatctatgatgacagctacctaggatactctgtggctgttggtgaattcagtggtgatgacacagaagactttgttgctggtgtgcccaaagggaacctcacttacggctatgtcaccatccttaatggctcagacattcgatccctctacaacttctcaggggaacagatggcctcctactttggctatgcagtggccgccacagacgtcaatggggacgggctggatgacttgctggtgggggcacccctgctcatggatcggacccctgacgggcggcctcaggaggtgggcagggtctacgtctacctgcagcacccagccggcatagagcccacgcccacccttaccctcactggccatgatgagtttggccgatttggcagctccttgacccccctgggggacctggaccaggatggctacaatgatgtggccatcggggctccctttggtggggagacccagcagggagtagtgtttgtatttcctgggggcccaggagggctgggctctaagccttcccaggttctgcagcccctgtgggcagccagccacaccccagacttctttggctctgcccttcgaggaggccgagacctggatggcaatggatatcctgatctgattgtggggtcctttggtgtggacaaggctgtggtatacaggggccgccccatcgtgtccgctagtgcctccctcaccatcttccccgccatgttcaacccagaggagcggagctgcagcttagaggggaaccctgtggcctgcatcaaccttagcttctgcctcaatgcttctggaaaacacgttgctgactccattggtttcacagtggaacttcagctggactggcagaagcagaagggaggggtacggcgggcactgttcctggcctccaggcaggcaaccctgacccagaccctgctcatccagaatggggctcgagaggattgcagagagatgaagatctacctcaggaacgagtcagaatttcgagacaaactctcgccgattcacatcgctctcaacttctccttggacccccaagccccagtggacagccacggcctcaggccagccctacattatcagagcaagagccggatagaggacaaggctcagatcttgctggactgtggagaagacaacatctgtgtgcctgacctgcagctggaagtgtttggggagcagaaccatgtgtacctgggtgacaagaatgccctgaacctcactttccatgcccagaatgtgggtgagggtggcgcctatgaggctgagcttcgggtcaccgcccctccagaggctgagtactcaggactcgtcagacacccagggaacttctccagcctgagctgtgactactttgccgtgaaccagagccgcctgctggtgtgtgacctgggcaaccccatgaaggcaggagccagtctgtggggtggccttcggtttacagtccctcatctccgggacactaagaaaaccatccagtttgacttccagatcctcagcaagaatctcaacaactcgcaaagcgacgtggtttcctttcggctctccgtggaggctcaggcccaggtcaccctgaacggtgtctccaagcctgaggcagtgctattcccagtaagcgactggcatccccgagaccagcctcagaaggaggaggacctgggacctgctgtccaccatgtctatgagctcatcaaccaaggccccagctccattagccagggtgtgctggaactcagctgtccccaggctctggaaggtcagcagctcctatatgtgaccagagttacgggactcaactgcaccaccaatcaccccattaacccaaagggcctggagttggatcccgagggttccctgcaccaccagcaaaaacgggaagctccaagccgcagctctgcttcctcgggacctcagatcctgaaatgcccggaggctgagtgtttcaggctgcgctgtgagctcgggcccctgcaccaacaagagagccaaagtctgcagttgcatttccgagtctgggccaagactttcttgcagcgggagcaccagccatttagcctgcagtgtgaggctgtgtacaaagccctgaagatgccctaccgaatcctgcctcggcagctgccccaaaaagagcgtcaggtggccacagctgtgcaatggaccaaggcagaaggcagctatggcgtcccactgtggatcatcatcctagccatcctgtttggcctcctgctcctaggtctactcatctacatcctctacaagcttggattcttcaaacgctccctcccatatggcaccgccatggaaaaagctcagctcaagcctccagccacctctgatgcctgagtcctcccaatttcagactcccattcctgaagaaccagtccccccaccctcattctactgaaaaggaggggtctgggtacttcttgaaggtgctgacggccagggagaagctcctctccccagcccagagacatacttgaagggccagagccaggggggtgaggagctggggatccctcccccccatgcactgtgaaggacccttgtttacacataccctcttcatggatgggggaactcagatccagggacagaggcccagcctccctgaagcctttgcattttggagagtttcctgaaacaactggaaagataactaggaaatccattcacagttctttgggccagacatgccacaaggacttcctgtccagctccaacctgcaaagatctgtcctcagccttgccagagatccaaaagaagcccccagtaagaacctggaacttggggagttaagacctggcagctctggacagccccaccctggtgggccaacaaagaacactaactatgcatggtgccccaggaccagctcaggacagatgccacaaggatagatgctggcccagggccagagcccagctccaaggggaatcagaactcaaatggggccagatccagcctggggtctggagttgatctggaacccagactcagacattggcaccaatccaggcagatccaggactatatttgggcctgctccagacctgatcctggaggcccagttcaccctgatttaggagaagccaggaatttcccaggacctgaaggggccatgatggcaacagatctggaacctcagcctggccagacacaggccctccctgttccccagagaaaggggagcccactgtcctgggcctgcagaatttgggttctgcctgccagctgcactgatgctgcccctcatctctctgcccaacccttccctcaccttggcaccagacacccaggacttatttaaactctgttgcaagtgcaataaatctgacccagtgcccccactgaccagaactagaaaaaaaaa

SEQ ID NO: 92 - DNA, 1420 bp, Homo sapiens
gcggacgtgggcaggagggctggaaaagccggcgctggagcggaacgggagtagctgcctgggcgccaaaggccgcggcactcccacgtggaccccgaagtcccgaacccggggatgggcccgcggctgcgaggggatcttctctggatcaagcaatggtggtgaaaaatgtttcgcaagggcaaaaaacgacacagtagtagcagttcccaaagtagcgaaatcagtactaagagcaagtctgtggattctagccttgggggtctttcacgatccagcactgtggccagcctcgacacagattccaccaaaagctcaggacaaagcaacaataattcagatacctgtgcagaatttcgaataaaatatgttggtgccattgagaaactgaaactctccgagggaaaaggccttgaagggccattagacctgataaattatatagacgttgcccagcaagatggaaagttgccttttgttcctccggaggaagaatttattatgggagtttccaagtatggcataaaagtatcaacatcagatcaatatgatgttttgcacaggcatgctctctacttaataatccggatggtgtgttacgatgacggtctgggggcgggaaaaagcttactggctctgaagaccacagatgcaagcaatgaggaatacagcctgtgggtttatcagtgcaacagcctggaacaagcacaagccatttgcaaggttttatccaccgcttttgactctgtattaacatctgagaaaccctgaatcctgcaatcaagtagaagtcaacttcatctgaaagttcagctgttttcaaactgcaatgctgaaatgttatgcaaataatgaagttatcccttgctctagattttctgaagaaaatggattgtgtaaaatgctgatcatttgtttattaaaatgtgtcctattacacagtgagttaactctcaatgaagtcatctattttctgggctaaaaaacttcatttgtctttttcaacttctaataagcttaacctaagtgtcacgaagacgagatgtcacagaggtccactcagtgacacacactgaaggcctgagggaagactgaggacatgggctcagtggtggcttcccagtcatggtatcactggcatggacctctgtccggcagaggtgtggactggagaccaggattcatgctggtctggaacaatgacattgccaacttaagacacacaaagcagattttcagaagtgtctggtcaagataacatgctggccaaccacaattcctagagttaagagaaccttaaaagattaccgctcatgctaaaagtatgtaaagatcccatgtacagtatgatagtgtactttttttaaaggactgtcaatatacaaaactttaaagattaaaaacattaaaaataaaaaaa

SEQ ID NO: 93 - DNA, 1270 bp, Homo sapiens
gcggacgtgggcaggagggctggaaaagccggcgctggagcggaacgggagtagctgcctgggcgccaaaggccgcggcactcccacgtggaccccgaagtcccgaacccggggatgggcccgcggctgcgaggggatcttctctggatcaagcaatggtggtgaaaaatgtttcgcaagggcaaaaaacgacacagtagtagcagttcccaaagtagcgaaatcagtactaagagcaagtctgtggattctagccttgggggtctttcacgatccagcactgtggccagcctcgacacagattccaccaaaagctcaggacaaagcaacaataattcagatacctgtgcagaatttcgaataaaatatgttggtgccattgagaaactgaaactctccgagggaaaaggccttgaagggccattagacctgataaattatatagacgttgcccagcaagatggaaagttgccttttgttcctccggaggaagaatttattatgggagtttccaagtatggcataaaagtatcaacatcagatcaatatgaacaagcacaagccatttgcaaggttttatccaccgcttttgactctgtattaacatctgagaaaccctgaatcctgcaatcaagtagaagtcaacttcatctgaaagttcagctgttttcaaactgcaatgctgaaatgttatgcaaataatgaagttatcccttgctctagattttctgaagaaaatggattgtgtaaaatgctgatcatttgtttattaaaatgtgtcctattacacagtgagttaactctcaatgaagtcatctattttctgggctaaaaaacttcatttgtctttttcaacttctaataagcttaacctaagtgtcacgaagacgagatgtcacagaggtccactcagtgacacacactgaaggcctgagggaagactgaggacatgggctcagtggtggcttcccagtcatggtatcactggcatggacctctgtccggcagaggtgtggactggagaccaggattcatgctggtctggaacaatgacattgccaacttaagacacacaaagcagattttcagaagtgtctggtcaagataacatgctggccaaccacaattcctagagttaagagaaccttaaaagattaccgctcatgctaaaagtatgtaaagatcccatgtacagtatgatagtgtactttttttaaaggactgtcaatatacaaaactttaaagattaaaaacattaaaaataaaaaaa

SEQ ID NO: 94 - DNA, 14985 bp, Homo sapiens
cctaattacatagttgaaaagcgtgaatcgggtacaacagcttggcagcttgtcaattccagtgtcaagcgcactcaaattaaagtcactcatctcacaaaatacatggaatattctttccgtgtcagttcagagaacagatttggtgtcagcaaacctctagaatcagcaccaataattgctgaacatccatttgtcccaccaagcgctcctaccagacctgaggtctaccatgtgtctgccaatgccatgtctattcgttgggaagaaccctaccacgatggtggcagtaaaatcattggctactgggttgagaagaaagaacgtaatacaattctttgggtgaaagaaaacaaagtgccatgcttagagtgcaactacaaagtaactggtttagtagaaggactggaatatcagttcagaacttatgcactcaatgctgcaggtgttagcaaggccagcgaagcttcaagacctataatggctcaaaatccagttgatgcaccaggcagaccaggggtgacagatgtccaaagatcaacagtatcactgatttggtctgccccagcgtatgatggaggcagcaaggttgtgggctacatcatagagcgtaagccagtcagtgaggtaggagatggtcgctggctgaagtgcaactacaccattgtatctgacaatttcttcaccgtgactgctctcagtgaaggagacacttatgagttccgtgtgttagccaagaatgcagcaggcgtaattagcaaagggtctgaatctacaggccctgtcacttgccgagatgaatacgctccacccaaagccgaactggatgcccgattacacggtgatctggttaccatcagagcaggttctgatcttgttctggatgctgcagttggtggcaaacctgaacccaaaattatctggaccaaaggagacaaggagctagatctctgtgaaaaagtctctttgcagtatactggcaaacgagcaactgctgtgatcaagttctgtgacagaagtgacagtggaaaatacactttaacagtgaaaaatgccagcgggaccaaggccgtgtctgtcatggtcaaagtgcttgattcccctggcccatgtggaaagctcaccgtcagcagagtaacacaggagaagtgcactttagcctggagccttccgcaggaagacggaggagcagaaatcactcactacatcgtggaaagacgcgagactagcaggctcaactgggtgattgttgaaggcgaatgcccaaccctatcctatgtcgttaccaggctcatcaagaacaatgagtacatattccgagtgagggcagtaaacaaatatggccctggtgtgcctgttgaatcagagccaattgtagccagaaactcattcactattccatcaccacccggcatacctgaagaagttgggactggcaaagagcatatcatcattcagtggacaaaacctgaatctgatggtggcaatgaaatcagcaactacctagtagacaaacgtgagaaggagagcctgcgctggacacgtgtcaacaaagactatgtggtgtatgataccaggctgaaggtgaccagcctgatggagggttgtgattaccagttccgggtgaccgcagtgaatgcagctggtaacagtgagcccagcgaacgttccaacttcatctcatgcagagaaccatcatatacccctggaccaccttctgctccaagagttgtggataccaccaaacacagcattagtttggcatggaccaaacccatgtacgatggtggtactgacattgtaggatatgttctggaaatgcaagagaaggacactgatcagtggtaccgagtgcataccaatgccacaataagaaatactgaattcactgtgccagaccttaaaatgggccagaaatattccttcagagttgctgccgtgaacgtgaagggtatgagcgaatacagcgaatcaattgctgaaattgagcccgtggaaagaatagaaataccagatcttgagcttgcagatgatctaaagaagactgtgaccatcagggctggggcctccttgcgcttgatggtgtctgtatctggaagaccacctcctgtcataacgtggagcaagcagggcattgaccttgcaagccgggcaattattgacaccactgagagctactcattgctaatagtggacaaagttaatcggtacgatgctggaaaatacacaattgaagctgaaaaccaatctggcaagaaatcagcaacagtccttgttaaagtctatgatactcctggtccctgtccttcagtgaaagttaaggaagtatcaagagattctgtgactataacttgggaaattcccacgattgatggtggagctccaatcaacaattacatcgttgagaagcgtgaagctgctatgagagcattcaaaacagtaactaccaaatgcagcaagacactttacagaatttctggacttgtagaaggaaccatgcactatttcagagtgctgccagaaaatatttatggcattggagaaccttgtgaaacatctgatgcagtactggtctcagaagtgcctttggtgcctgcaaagctagaagtggtcgatgtcaccaaatccactgttacccttgcctgggaaaaaccactctacgatggtggtagccgactcactggatatgttctcgaggcctgcaaagctggcacagagagatggatgaaggttgtcaccttaaaacccacagtcctagagcacactgttacttccttaaatgaaggtgaacaatacttatttagaataagggcacaaaatgagaaaggtgtgtcagaaccaagagagactgtcacagccgtgactgtacaagacctcagagtgttgccaacaatcgatctttctacaatgcctcagaagaccatccatgtcccagctggcagaccagtagagctggtgatacctattgctggccgtccacctcctgctgcttcctggttctttgctggttctaaactgagagaatcagagcgtgtcacagttgaaactcacactaaagtagctaaattaaccatccgtgaaaccactatcagagatactggagaatacacacttgaattgaagaatgttaccggaactactttagaaaccattaaagttatcattcttgacaagcctggtccaccaacaggacctattaagattgatgaaattgatgctacatcaattaccatttcctgggaaccacctgaattggacggtggtgctccactgagtggttatgtggtagaacaacgtgacgctcatcgtccaggatggctgcccgtttctgaatcagtgactaggtccacgtttaagtttaccagactcaccgaaggaaatgagtatgtgttccgtgtggctgcaacaaaccgcttcgggattggctcttacttgcagtctgaggtcatagagtgtcgcagcagcatccgtattcctggacccccagaaacattacagatatttgatgtttcccgtgatggcatgacacttacttggtacccaccagaggatgacggtggctcccaagtgactggatatattgtggagcgcaaagaagtgagagcagatcgatgggtccgtgtaaataaagtacctgtgacaatgacacggtaccgctccactggccttactgaaggcttagaatatgaacaccgtgtcacagccattaatgcaagagggtctgggaaaccaagtcgtccttccaaacccatcgttgccatggatccaattgctcctccaggaaagccacaaaacccaagagttactgatacaacaaggacatcagtctccctggcctggagtgttccagaagatgaaggaggatctaaagtcacaggctacttgattgaaatgcaaaaagtagatcaacatgaatggaccaagtgtaacaccactccaaccaagattcgagagtatactctaacacacctacctcagggtgcagaatacaggttccgcgtcctagcttgtaatgctggtggacctggtgagcctgctgaggtaccaggaacagtcaaagtcactgaaatgcttgaatatcctgattatgaacttgatgaaagataccaagaaggtatctttgtaaggcaaggtggcgtcatcagacttaccataccaatcaaagggaaaccattcccaatatgtaaatggaccaaggaaggccaggatattagtaagcgtgccatgattgcaacatctgaaacacacactgagcttgtgatcaaagaagcagacaggggtgattctggcacttatgacctggttctggaaaataaatgtggcaagaaggctgtctacatcaaggtcagggtgataggaagtcccaacagtccagaagggccactggaatatgatgacatccaagtccgctctgtgagggtcagctggagacctcctgctgatgatggtggtgctgacatcttaggctacatcctcgagagacgagaagtgcctaaagccgcctggtataccattgattccagagtccgaggtacatctctggtggtaaaaggcctcaaagagaatgtagaataccatttccgtgtttcagcagaaaaccagtttggcataagcaaacccttgaaatctgaggaaccagtcacaccaaaaacaccattgaatcctccagaacctccaagcaatcctccagaagtactcgatgtaaccaagagttctgttagcttgtcctggtcccggcccaaagatgatggtggttctagagtcacaggctactacatcgaacgcaaagagacatccactgacaaggtggtcagacacaacaagactcagatcaccaccacaatgtacactgtcacagggcttgttcccgatgctgagtatcagttccgcatcatcgcacagaatgatgttggcctgagtgagaccagccctgcttctgaaccagttgtttgcaaagatccatttgataaaccaagccaaccaggagaacttgagattctttcaatatccaaagatagtgtcactctacagtgggagaaacctgaatgtgatggtggtaaagaaattcttggatactgggttgaatatagacagtctggagacagtgcctggaagaagagcaataaggaacgtattaaggacaagcaattcacaataggaggtttgctggaagctactgagtatgaattcagggtttttgctgagaatgagactgggctgagcagacctcgcagaactgctatgtctataaagactaaactcacatctggagaggccccaggaatacgcaaagaaatgaaggatgttaccacaaaattgggtgaagctgctcaactctcatgccagattgttggaaggcctcttcctgacattaaatggtacagatttggtaaagagctcatacaaagccggaaatacaaaatgtcttcagatggacgcacacacactcttacagtaatgacagaggaacaggaagatgaaggtgtttatacctgcatagccaccaatgaggttggagaagtagaaaccagtagtaagcttctcctgcaagcaacaccgcagttccatcctggttacccactgaaagagaaatattatggagctgtgggttccacacttcggcttcatgttatgtacattggtcgtccagtacctgccatgacttggttccatggtcagaaacttttgcaaaactcagaaaacattactattgaaaacactgagcactatactcatcttgtcatgaagaatgtccaacgtaagactcatgctgggaaatacaaagtccagctcagcaatgtttttggaacagttgatgccatccttgatgtggaaatacaagataaaccagacaaacctacaggaccaattgtgatcgaagctctattgaagaactccgcagtgatcagctggaaaccacccgcagatgacggaggctcctggatcaccaactatgtggtggaaaaatgtgaggccaaggagggggctgaatggcaattggtgtcttcagccatctcagtgacaacctgtagaattgtgaacctcacagaaaatgctggctattacttccgggtttcagctcagaacactttcggcatcagtgaccctctagaagtgtcctcagttgtgatcattaagagtccatttgaaaagccaggtgctcctggcaaaccaactattactgctgtcacaaaagattcttgtgttgtggcctggaagccacctgccagtgatggaggtgcaaagattagaaattactaccttgagaagcgtgagaagaagcagaataaatggatttctgtgacaacagaagaaattcgagaaactgtcttttcagtgaaaaaccttattgaaggtcttgaatacgagtttcgtgtgaaatgtgaaaatctaggtggggaaagtgaatggagtgaaatatcagaacccatcactcccaaatctgatgtcccaattcaggcaccacactttaaagaggaactgagaaatctaaatgtcagatatcagagcaatgctaccttggtctgcaaagtgactggtcatccaaaacctatcgtcaaatggtacagacaaggcaaagaaatcattgcagatggattaaaatataggattcaagaatttaagggtggctaccaccagctcatcattgcaagtgtcacagatgatgatgccacagtttaccaagtcagagctaccaaccaagggggatctgtgtctggcactgcctccttggaagtggaagttccagctaagatacacttacctaaaactcttgaaggcatgggagcagttcatgctctccgaggtgaagtggtcagcatcaagattcctttcagtggcaaaccagatcctgtgatcacctggcagaaaggacaagatctcattgacaataatggccactaccaagttattgtcacaagatccttcacatcacttgttttccccaatggggtagagagaaaagatgctggtttctatgtggtctgtgctaaaaacagatttggaattgatcagaagacagttgaactggatgtggctgatgttcctgacccacccagaggagtcaaagttagtgatgcctcacgagattctgtcaacttaacatggactgagccagcctctgatggtggcagcaaaatcaccaactacattgttgaaaaatgtgcaactactgcagaaagatggctccgtgtaggacaggcccgagaaacacgttataccgtgatcaacttatttggaaaaacaagttaccagttccgggtaatagctgaaaataaatttggtctgagcaagccttcagagccttcagaaccaaccataaccaaagaagataagaccagagctatgaactatgatgaagaggtagatgaaaccagggaagtctccatgactaaagcatctcactcttcaaccaaggaactctatgagaaatatatgattgctgaagatcttgggcgtggtgagtttggaattgtccatcgttgtgttgaaacatcctcaaagaagacatacatggccaaatttgttaaagtcaaagggactgatcaggttttggtaaagaaggaaatttccattctgaatattgctaggcatagaaacatcttacacctccatgaatcatttgaaagcatggaagaattagttatgatctttgagtttatatcaggacttgacatatttgagcgcattaacacaagtgcttttgaacttaatgaaagagaaattgtaagttatgttcaccaggtctgtgaagcacttcagtttttacacagtcataatattggacactttgacattagaccagaaaatatcatttaccaaaccagaagaagctctaccattaaaatcatagaatttggtcaagcccgtcagctgaaaccaggggacaacttcaggcttctattcactgccccagaatactatgcacctgaagtccaccagcatgatgttgtcagcacagccacagacatgtggtcacttggaacactggtatatgtgctattgagtggtatcaacccattcctggctgaaactaaccaacagatcattgagaatatcatgaatgctgaatatactttcgatgaggaagcattcaaagagattagcattgaagccatggattttgttgaccggttgttagtgaaagagaggaaatctcgcatgacagcatcggaggctctccagcacccatggttgaagcagaagatagaaagagtcagtactaaagttatcagaacattaaaacaccggcgttattaccacaccctgatcaagaaagacctcaacatggttgtgtcagcagcccggatctcctgtggtggtgcaattcgatctcagaagggagtgagtgttgctaaagttaaagtggcatccattgaaattggcccagtttctgggcagataatgcatgcagttggtgaagaaggaggacatgtcaaatatgtatgcaaaattgaaaattatgatcagtctacccaagtgacttggtactttggtgtccgacagctggagaacagtgagaaatacgaaatcacctacgaagatggagtggccatcctctatgtcaaagacattaccaaattagatgatggtacctacagatgcaaagtagtcaatgactatggtgaagacagttcttatgcagagctatttgttaaaggtgtgagagaagtctatgactattactgccgtagaaccatgaagaaaattaagcgcagaacagacacaatgagactcctggaaaggccaccagaatttaccctgcctctctataataagacagcttatgtaggtgaaaatgtccggtttggagtaactataactgtccacccagagcctcatgtaacatggtataaatcaggtcagaaaatcaaaccaggtgacaatgacaagaagtacacatttgagtcagacaagggtctttaccaattaacaatcaacagtgtcactacagatgatgacgctgaatatactgttgtggcaaggaacaaatatggtgaagacagctgtaaagcaaagctgacagtaaccctacacccacctccaacagatagtaccttaagacccatgttcaaaaggttactggcaaatgcagaatgccaagaaggccaaagtgtctgctttgagatcagagtgtctggcatccccccaccaacattaaaatgggagaaagatggtcagccactgtccctcgggcctaacattgaaattatccatgaaggcttggattattatgctctgcacatcagggacactttgcctgaagacacgggttattatagagtcacagccactaacacagctgggtccaccagctgccaggctcacctacaagtggaacgcctgaggtacaagaaacaggaattcaagagtaaggaggagcatgagcgacacgtacaaaaacaaattgacaaaaccctcagaatggctgaaattctttctggaactgaaagtgtaccactgacacaggtagctaaagaggctctgagagaagctgctgtcctttataaaccggctgtaagcaccaagactgtaaaaggggaattcagacttgagatagaagaaaagaaggaggagagaaaactccggatgccttatgatgtaccagagccacgcaagtataagcagactaccatagaagaagaccaacgcatcaagcagttcgtgcccatgtctgacatgaagtggtataaaaagatacgtgatcagtatgaaatgcctgggaaacttgacagagttgtacagaaacgacccaagcgcatccgcctttcaagatgggaacagttctatgtgatgcctcttccacgcattacagatcaatacagacctaaatggcgtattcctaaactgtcccaagatgatcttgagatagtgagaccagcccgccggcgtacaccttctcctgattatgacttttactaccgacctagaagacgttctcttggggacatctctgatgaagaattactcctccccattgatgactacttagcaatgaaaagaacagaggaagagaggctgcgtcttgaagaagagcttgagttaggtttttcagcttcacccccaagtcgaagccctccacactttgagctttctagcctacgttactcttcaccacaagctcatgtcaaggtggaggaaacaagaaaaaacttcaggtattcaacctatcacatcccaacgaaggctgaagctagtacaagttatgcagaactgagggaacggcatgcccaggctgcgtacagacagccaaagcaacggcaaagaatcatggctgagagggaggatgaagagttgcttcgcccagttacgaccacccagcatctctcagaatacaaaagcgaacttgacttcatgtcaaaggaggaaaagtctagaaagaaatcaaggcgacaaagagaagtgacagaaataacagaaattgaggaagaatacgaaatctcaaaacatgctcaaagagaatcatcctcatctgcgtctagactactgagacgacggcgctccctgtctccaacttatattgagttaatgaggccagtgtctgagctgatccggtcacgtccacaaccggctgaggaatacgaagatgacacagaaagaaggtcacctactccagagagaactcgcccacgatcccccagccctgtgtctagtgagagatcactctcgagatttgagaggtctgcaagatttgatatcttttccaggtatgagtccatgaaagctgctttaaaaactcagaagacatcagaaaggaagtatgaagttttgagtcagcagcctttcacactggaccatgcccctcgaatcacactgagaatgcgctcgcacagggtaccatgtggccaaaatacacgttttattttaaatgttcagtctaagccaactgccgaagttaaatggtaccacaatggtgtggaactccaagaaagcagtaagattcattacaccaacacgagtggagttctcaccctggaaattctggactgtcatactgatgacagtggaacctaccgtgctgtgtgcaccaactacaagggcgaacgttctgactatgcaacgttggacgtgacaggaggggattataccacctatgcttcccaacgcagagatgaagaggtccccagatctgttttccctgagctgacaagaacagaggcgtatgctgttccatcatttaagaaaacatctgagatggaagcttcgtcttctgtcagggaagtgaaatcacagatgacggagacaagggaaagtctctcctcatatgaacactctgcatctgcagaaatgaaaagtgctgcattagaagaaaagtcactggaagaaaaatccacaaccagaaagatcaagacgactttggcggcaagaattctaacaaagccacggtccatgaccgtctacgagggcgagtctgcaaggttttcttgtgacaccgatggtgagccggtaccaactgtgacctggctgcgtaaaggacgagtgctaagtacttctgcccgccaccaagtgaccaccacaaagtacaaatcaacctttgagatctcttcagtccaggcttccgatgagggcaattacagcgtggtggtagaaaacagtgaagggaaacaagaagcagagttcactctgactattcaaaaggccagggtaactgaaaaggctgtgacatcaccaccaagagtcaaatccccagagcctcgggtgaaatccccagaagcagttaagtctccaaaacgagtgaaatctccagaaccttctcacccgaaagccgtatcacccacagagacaaaaccaacaccaatagagaaagttcagcacctcccagtctctgccccaccaaagattactcagttcctgaaagcagaagcttctaaagagattgcaaaactgacctgtgtggttgaaagcagtgtattaagggcaaaagaggtcacctggtataaagatggcaagaaactgaaggaaaatgggcatttccagtttcattattcagcagatggtacctatgagctcaaaatcaataacctcactgaatctgatcaaggagaatatgtttgtgagatttctggtgaaggtggaacgtctaaaaccaacttacaatttatggggcaagcctttaagagtatccatgagaaggtatcaaaaatatcagaaactaagaaatcagatcagaaaaccactgagtcaacagtaaccagaaaaactgaaccaaaagctcctgaaccaatttcctcaaaaccagtaattgttactgggttgcaggatacaactgtttcttcagacagtgttgctaaatttgcagttaaggctactggagaaccccggccaactgccatctggacaaaagatggaaaggccattacacaaggaggtaaatataaactctctgaagacaagggagggttcttcttagaaattcataagactgatacttctgacagtggactttatacttgtacagtaaaaaattcagctggatctgtgtcctctagctgcaaattaacaataaaagctataaaagatactgaggcacagaaagtctctacacaaaagacttctgaaattacacctcagaagaaagctgttgtccaagaggaaatttcccaaaaagccctaaggtctgaagaaattaagatgtcagaggcaaaatctcaagaaaagttagccctcaaagaggaagcttcaaaggttctgatttctgaagaagtcaagaaatcagcagcaacctccctggaaaaatccattgtccatgaggaaatcactaaaacatcacaggcatcagaagaagtcagaactcatgctgagattaaagcattttctactcagatgagcataaacgaaggtcaaagactggttttaaaagccaacattgctggtgccactgatgtgaaatgggtactgaatggcgtagagcttaccaactctgaggagtaccgatatggtgtctcaggcagcgatcagaccctaaccatcaagcaagccagtcacagagatgaaggaatcctcacctgcataagcaaaaccaaggaaggaatcgtcaagtgtcagtatgatttgacactgagcaaagaactctcagatgctccagccttcatctcacagcctagatctcaaaatattaatgaaggacaaaatgttctctttactcgtgaaatcagtggcgagccatcccctgaaatcgaatggtttaaaaacaacctgccaatttctatttcttcaaatgtcagcataagccgctccagaaatgtatactcccttgaaatccgaaatgcatcagtcagcgacagtggaaagtacacaattaaggccaaaaatttccgtggccagtgttcagctacagcttccttaatggtccttcctctagttgaagaaccttccagagaggtagtattgagaacaagtggtgacacaagcttgcaaggaagcttctcgtctcagtcagtccaaatgtctgcctccaagcaggaggcctccttcagcagtttcagcagcagcagtgctagcagcatgactgagatgaaatttgcaagcatgtctgcccaaagcatgtcctccatgcaagagtcctttgtagaaatgagttccagcagctttatgggaatatctaatatgacacaactggaaagctcaactagtaaaatgcttaaagcaggcataagaggaattccgcctaaaattgaagctcttccatctgatatcagcattgatgaaggcaaagttctaacagtagcctgtgctttcacgggtgagcctaccccagaagtaacatggtcctgtggtggaagaaaaatccacagtcaagaacaggggaggttccacattgaaaacacagatgacctgacaaccctgatcatcatggacgtacagaaacaagatggtggactttataccctgagtttagggaatgaatttggatctgactctgccactgtgaatatacatattcgatccatttaagagggcctgtgccttatactctacactcattcttaacttttcgcaaacgtttcacacggactaatctttctgaactgtaaatatttaaagaaaaaaagtagttttgtatcaacctaaatgagtcaaagttcaaaaatattcatttcaatcttttcataattgttgacctaagaatataatacatttgctagtgacatgtacatactgtatatagccggattaacggttataaagttttgtaccatttattttatgacattttacaatgtaagttttgaaactaactgttggtaggagaaagtttcttatggaacgaataccctgctcaacatttaatcaatctttgtgcctcaacatactgttgatgtctaagtatgcctcagtgggttgagaaaatccccattgaagatgtcctgtccacctaaaagagaatgatgctgtgcatatcacttgatatgtgcaccaatacctactgaatcagaaatgtaaggcattggtgatgtttgcatttaccctcctgtaagcaacactttaacgtcttacattttctctgatgatgtcacacaaaattatcatgacaaatattaccagagcaaagtgtaacggccaacactttgttcgctcattttacgctgtctctgacataaggagtgcctgaatagcttggaaaagtaacatctcctggccatcccttcatttaaccaagctattcaagtattcctatgccagagcagtgccaactcttggaggtcccagagtgcagccaatgcctttgtgtggtagttctaaattttaattgcacctgaaaaacctgggcacctaagcaatgagccacagcaaaaagtaaagaacaacaacaaaataaagctgttgttaaattttaaacaatattactaattgcccaaaatgtcaatttgatgtagttcttttcatgcaagtataaattcaattgttagttataattgttggacctccttgagatagtaacaacaaaataaagcaagctatctgcacctcaaaaaaaaaaaaaaa

SEQ ID NO: 95 - DNA, 4433 bp, Homo sapiens
gccgccctcgccaccgctcccggccgccgcgctccggtacacacaggatccctgctgggcaccaacagctccaccatggggctggcctggggactaggcgtcctgttcctgatgcatgtgtgtggcaccaaccgcattccagagtctggcggagacaacagcgtgtttgacatctttgaactcaccggggccgcccgcaaggggtctgggcgccgactggtgaagggccccgacccttccagcccagctttccgcatcgaggatgccaacctgatcccccctgtgcctgatgacaagttccaagacctggtggatgctgtgcgggcagaaaagggtttcctccttctggcatccctgaggcagatgaagaagacccggggcacgctgctggccctggagcggaaagaccactctggccaggtcttcagcgtggtgtccaatggcaaggcgggcaccctggacctcagcctgaccgtccaaggaaagcagcacgtggtgtctgtggaagaagctctcctggcaaccggccagtggaagagcatcaccctgtttgtgcaggaagacagggcccagctgtacatcgactgtgaaaagatggagaatgctgagttggacgtccccatccaaagcgtcttcaccagagacctggccagcatcgccagactccgcatcgcaaaggggggcgtcaatgacaatttccagggggtgctgcagaatgtgaggtttgtctttggaaccacaccagaagacatcctcaggaacaaaggctgctccagctctaccagtgtcctcctcacccttgacaacaacgtggtgaatggttccagccctgccatccgcactaactacattggccacaagacaaaggacttgcaagccatctgcggcatctcctgtgatgagctgtccagcatggtcctggaactcaggggcctgcgcaccattgtgaccacgctgcaggacagcatccgcaaagtgactgaagagaacaaagagttggccaatgagctgaggcggcctcccctatgctatcacaacggagttcagtacagaaataacgaggaatggactgttgatagctgcactgagtgtcactgtcagaactcagttaccatctgcaaaaaggtgtcctgccccatcatgccctgctccaatgccacagttcctgatggagaatgctgtcctcgctgttggcccagcgactctgcggacgatggctggtctccatggtccgagtggacctcctgttctacgagctgtggcaatggaattcagcagcgcggccgctcctgcgatagcctcaacaaccgatgtgagggctcctcggtccagacacggacctgccacattcaggagtgtgacaagagatttaaacaggatggtggctggagccactggtccccgtggtcatcttgttctgtgacatgtggtgatggtgtgatcacaaggatccggctctgcaactctcccagcccccagatgaacgggaaaccctgtgaaggcgaagcgcgggagaccaaagcctgcaagaaagacgcctgccccatcaatggaggctggggtccttggtcaccatgggacatctgttctgtcacctgtggaggaggggtacagaaacgtagtcgtctctgcaacaaccccacaccccagtttggaggcaaggactgcgttggtgatgtaacagaaaaccagatctgcaacaagcaggactgtccaattgatggatgcctgtccaatccctgctttgccggcgtgaagtgtactagctaccctgatggcagctggaaatgtggtgcttgtccccctggttacagtggaaatggcatccagtgcacagatgttgatgagtgcaaagaagtgcctgatgcctgcttcaaccacaatggagagcaccggtgtgagaacacggaccccggctacaactgcctgccctgccccccacgcttcaccggctcacagcccttcggccagggtgtcgaacatgccacggccaacaaacaggtgtgcaagccccgtaacccctgcacggatgggacccacgactgcaacaagaacgccaagtgcaactacctgggccactatagcgaccccatgtaccgctgcgagtgcaagcctggctacgctggcaatggcatcatctgcggggaggacacagacctggatggctggcccaatgagaacctggtgtgcgtggccaatgcgacttaccactgcaaaaaggataattgccccaaccttcccaactcagggcaggaagactatgacaaggatggaattggtgatgcctgtgatgatgacgatgacaatgataaaattccagatgacagggacaactgtccattccattacaacccagctcagtatgactatgacagagatgatgtgggagaccgctgtgacaactgtccctacaaccacaacccagatcaggcagacacagacaacaatggggaaggagacgcctgtgctgcagacattgatggagacggtatcctcaatgaacgggacaactgccagtacgtctacaatgtggaccagagagacactgatatggatggggttggagatcagtgtgacaattgccccttggaacacaatccggatcagctggactctgactcagaccgcattggagatacctgtgacaacaatcaggatattgatgaagatggccaccagaacaatctggacaactgtccctatgtgcccaatgccaaccaggctgaccatgacaaagatggcaagggagatgcctgtgaccacgatgatgacaacgatggcattcctgatgacaaggacaactgcagactcgtgcccaatcccgaccagaaggactctgacggcgatggtcgaggtgatgcctgcaaagatgattttgaccatgacagtgtgccagacatcgatgacatctgtcctgagaatgttgacatcagtgagaccgatttccgccgattccagatgattcctctggaccccaaagggacatcccaaaatgaccctaactgggttgtacgccatcagggtaaagaactcgtccagactgtcaactgtgatcctggactcgctgtaggttatgatgagtttaatgctgtggacttcagtggcaccttcttcatcaacaccgaaagggacgatgactatgctggatttgtctttggctaccagtccagcagccgcttttatgttgtgatgtggaagcaagtcacccagtcctactgggacaccaaccccacgagggctcagggatactcgggcctttctgtgaaagttgtaaactccaccacagggcctggcgagcacctgcggaacgccctgtggcacacaggaaacacccctggccaggtgcgcaccctgtggcatgaccctcgtcacataggctggaaagatttcaccgcctacagatggcgtctcagccacaggccaaagacgggtttcattagagtggtgatgtatgaagggaagaaaatcatggctgactcaggacccatctatgataaaacctatgctggtggtagactagggttgtttgtcttctctcaagaaatggtgttcttctctgacctgaaatacgaatgtagagatccctaatcatcaaattgttgattgaaagactgatcataaaccaatgctggtattgcaccttctggaactatgggcttgagaaaacccccaggatcacttctccttggcttccttcttttctgtgcttgcatcagtgtggactcctagaacgtgcgacctgcctcaagaaaatgcagttttcaaaaacagactcagcattcagcctccaatgaataagacatcttccaagcatataaacaattgctttggtttccttttgaaaaagcatctacttgcttcagttgggaaggtgcccattccactctgcctttgtcacagagcagggtgctattgtgaggccatctctgagcagtggactcaaaagcattttcaggcatgtcagagaagggaggactcactagaattagcaaacaaaaccaccctgacatcctccttcaggaacacggggagcagaggccaaagcactaaggggagggcgcatacccgagacgattgtatgaagaaaatatggaggaactgttacatgttcggtactaagtcattttcaggggattgaaagactattgctggatttcatgatgctgactggcgttagctgattaacccatgtaaataggcacttaaatagaagcaggaaagggagacaaagactggcttctggacttcctccctgatccccacccttactcatcacctgcagtggccagaattagggaatcagaatcaaaccagtgtaaggcagtgctggctgccattgcctggtcacattgaaattggtggcttcattctagatgtagcttgtgcagatgtagcaggaaaataggaaaacctaccatctcagtgagcaccag

SEQ ID NO: 96 - DNA, 5177 bp, Homo sapiens
ggactgcgaaaggagcagggttgcggagctagggctccagcctgcggccgcgcattcttgcgtctggccagccgcgagctctaagggtcggccccgcccggtccgcccccgcggctccctgccaggctctcgcgggcgcgctcggggtggggcctcgcggctggcggagatgcggccggggctgcgcggtggtgatgcgagcctgctgggcggcgcgccggggcagccggagccgcgcgccgcggcgctgtaatcggacaccaagagcgctcgcccccggcctccggccactttccattcactccgaggtgcttgattgagcgacgcggagaagagctccgggtgccgcggcactgcagcgctgagattcctttacaaagaaactcagaggaccgggaagaaagaatttcacctttgcgacgtgctagaaaataaggtcgtctgggaaaaggactggagacacaagcgcatccaaccccggtagcaaactgatgacttttccgtgctgatttctttcaacctcggtattttcccttggatattaacttgcatatctgaagaaatggcattccggacaatttgcgtgttggttggagtatttatttgttctatctgtgtgaaaggatcttcccagccccaagcaagagtttatttaacatttgatgaacttcgagaaaccaagacctctgaatacttcagcctttcccaccatcctttagactacaggattttattaatggatgaagatcaggaccggatatatgtgggaagcaaagatcacattctttccctgaatattaacaatataagtcaagaagctttgagtgttttctggccagcatctacaatcaaagttgaagaatgcaaaatggctggcaaagatcccacacacggctgtgggaactttgtccgtgtaattcagactttcaatcgcacacatttgtatgtctgtgggagtggcgctttcagtcctgtctgtacttacttgaacagagggaggagatcagaggaccaagttttcatgattgactccaagtgtgaatctggaaaaggacgctgctctttcaaccccaacgtgaacacggtgtctgttatgatcaatgaggagcttttctctggaatgtatatagatttcatggggacagatgctgctatttttcgaagtttaaccaagaggaatgcggtcagaactgatcaacataattccaaatggctaagtgaacctatgtttgtagatgcacatgtcatcccagatggtactgatccaaatgatgctaaggtgtacttcttcttcaaagaaaaactgactgacaataacaggagcacgaaacagattcattccatgattgctcgaatatgtcctaatgacactggtggactgcgtagccttgtcaacaagtggaccactttcttaaaggcgaggctggtgtgctcggtaacagatgaagacggcccagaaacacactttgatgaattagaggatgtgtttctgctggaaactgataacccgaggacaacactagtgtatggcatttttacaacatcaagctcagttttcaaaggatcagccgtgtgtgtgtatcatttatctgatatacagactgtgtttaatgggccttttgcccacaaagaagggcccaatcatcagctgatttcctatcagggcagaattccatatcctcgccctggaacttgtccaggaggagcatttacacccaatatgcgaaccaccaaggagttcccagatgatgttgtcacttttattcggaaccatcctctcatgtacaattccatctacccaatccacaaaaggcctttgattgttcgtattggcactgactacaagtacacaaagatagctgtggatcgagtgaacgctgctgatgggagataccatgtcctgtttctcggaacagatcggggtactgtgcaaaaagtggttgttcttcctactaacaactctgtcagtggcgagctcattctggaggagctggaagtctttaagaatcatgctcctataacaacaatgaaaatttcatctaaaaagcaacagttgtatgtgagttccaatgaaggggtttcccaagtatctctgcaccgctgccacatctatggtacagcctgtgctgactgctgcctggcgcgggacccttattgcgcctgggatggccattcctgttccagattctacccaactgggaaacggaggagccgaagacaagatgtgagacatggaaacccactgactcaatgcagaggatttaatctaaaagcatacagaaatgcagctgaaattgtgcagtatggagtaaaaaataacaccacttttctggagtgtgcccccaagtctccgcaggcatctatcaagtggctgttacagaaagacaaagacaggaggaaagaggttaagctgaatgaacgaataatagccacttcacagggactcctgatccgctctgttcagggttctgaccaaggactttatcactgcattgctacagaaaatagtttcaagcagaccatagccaagatcaacttcaaagttttagattcagaaatggtggctgttgtgacggacaaatggtccccgtggacctgggccagctctgtgagggctttacccttccacccgaaggacatcatgggggcattcagccactcagaaatgcagatgattaaccaatactgcaaagacactcggcagcaacatcagcagggagatgaatcacagaaaatgagaggggactatggcaagttaaaggccctcatcaatagtcggaaaagtagaaacaggaggaatcagttgccagagtcataatattttcttatgtgggtcttatgcttccattaacaaatgctctgtcttcaatgatcaaattttgagcaaagaaacttgtgctttaccaaggggaattactgaaaaaggtgattactcctgaagtgagttttacacgaactgaaatgagcatgcattttcttgtatgatagtgactagcactagacatgtcatggtcctcatggtgcatataaatatatttaacttaacccagattttatttatatctttattcaccttttcttcaaaatcgatatggtggctgcaaaactagaattgttgcatccctcaattgaatgagggccatatccctgtggtattcctttcctgctttggggctttagaattctaattgtcagtgattttgtatatgaaaacaagttccaaatccacagcttttacgtagtaaaagtcataaatgcatatgacagaatggctatcaaaagaaatagaaaaggaagacggcatttaaagttgtataaaaacacgagttattcataaagagaaaatgatgagtttttatggttccaatgaaatatcttcccctttttttaagattgtaaaaataatcagttactggtatctgtcactgacctttgtttccttattcaggaagataaaaatcagtaacctaccccatgaagatatttggtgggagttatatcagtgaagcagtttggtttatattcttatgttatcaccttccaaacaaaagcacttactttttttggaagttatttaatttattttagactcaaagaatataatcttgcactactcagttattactgtttgttctcttattccctagtctgtgtggcaaattaaacaatataagaaggaaaaatttgaagtattagacttctaaataaggggtgaaatcatcagaaagaaaaatcaaagtagaaactactaattttttaagaggaatttataacaaatatggctagttttcaacttcagtactcaaattcaatgattcttccttttattaaaaccagtctcagatatcatactgatttttaagtcaacactatatattttatgatcttttcagtgtgatggcaaggtgcttgttatgtctagaaagtaagaaaacaatatgaggagacattctgtctttcaaaaggtaatggtacatacgttcactggtctctaagtgtaaaagtagtaaattttgtgatgaataaaataattatctcctaattgtatgttagaataattttattagaataatttcatactgaaattattttctccaaataaaaattagatggaaaaatgtgaaaaaaattattcatgctctcatatatattttaaaaacactacttttgcttttttatttaccttttaagacattttcatgcttccaggtaaaaacagatattgtaccatgtacctaatccaaatatcatataaacattttatttatagttaataatctatgatgaaggtaattaaagtagattatggcctttttaagtattgcagtctaaaacttcaaaaactaaaatcattgtcaaaattaatatgattattaatcagaatatcagatatgattcactatttaaactatgataaattatgataatatatgaggaggcctcgctatagcaaaaatagttaaaatgctgacataacaccaaacttcattttttaaaaaatctgttgttccaaatgtgtataattttaaagtaatttctaaagcagtttattataatggtttgcctgcttaaaaggtataattaaacttcttttctcttctacattgacacacagaaatgtgtcaatgtaaagccaaaaccatcttctgtgtttatggccaatctattctcaaagttaaaagtaaaattgtttcagagtcacagttccctttatttcacataagcccaaactgatagacagtaacggtgtttagttttatactatatttgtgctatttaattctttctattttcacaattattaaattgtgtacactttcattacttttaaaaatgtagaaattcttcatgaacataactctgctgaatgtaaaagaaaattttttttcaaaaatgctgttaatgtatactactggtggttgattggttttattttatgtagcttgacaattcagtgacttaatatctattccatttgtattgtacataaaattttctagaaatacacttttttccaaagtgtaagtttgtgaatagattttagcatgatgaaactgtcataatggtgaatgttcaatctgtgtaagaaaacaaactaaatgtagttgtcacactaaaatttaattggatattgatgaaatcattggcctggcaaaataaaacatgttgaattcccc

SEQ ID NO: 97 - DNA, 8056 bp, Homo sapiens
ctgctctccctgagcccgctcccgagcgctgctttcccgccgcgggtgggcttcgcagcctcaggccagccgcggcccttggcccgctgcagccccggccctccaccttccccgtgcaggggcggcccggccagtgtcgctcatcccgggacgctcccttctcccacccaggactgccccgcggagctggcttggacacccaactttgccacctcgagggtcgtctctgctgggcgcgaacctgcccacccaccggttggccgcgcgctcggggaccgtgctcgtggcccccaagccggtgcccccattctggaactcagcgagtagggggcggctctggggaagtggcagggggcggctgcagctgctgcctccacttccctagccaggtgctgaagaggatcctcggagccgctctggcccccaggcgctggatgactggcaccagcgctcctcgcacctgtgttggtgtgtgagacttgggctggagtgcccacgtggctgtggagtcagtgtgattcatgattgaggaaacgcgtcctccatcctctctctccttggcactttccacacatgaggagaagaagagcttctgtttagaagacacgtgcccagagtcagaggccccttgcccaccatgaagggaacctgtgttatagcatggctgttctcaagcctggggctgtggagactcgcccacccagaggcccagggtacgactcagtgccagagaaccgagcatccagtcatctcctataaagaaattggcccctggttacgggagttcagagcgaagaatgctgcggatttctcgcagttaacatttgacccaggacagaaagaacttgttgtaggagcaagaaactacctcttcaggttacagcttgaggatctgtctcttatccaggctgtggaatgggagtgtgatgaagctaccaaaaaggcctgttacagcaaaggcaaatcaaaggaggaatgtcagaactacatccgggtgcttctggtgggtggcgaccggttattcacctgtgggaccaatgcattcacgcctgtctgcaccaaccgctcgttgagcaacctggctgagatccatgatcagatcagtggcatggcccgctgtccctacagtccccagcacaattccacagcgctcctcacagctggtggggagctctatgctgctacagccatggattttccaggacgtgatcctgccatttaccgaagcctaggcattttacctcctctccgcacggcgcagtacaactccaaatggctcaatgagccaaactttgtgtcatcttatgacatcggaaattttacctacttctttttccgagaaaatgcagtagagcatgactgtgggaaaacagtgttctccagagctgcccgggtgtgcaagaacgatattggtgggcgcttcctgctggaagacacctggaccacattcatgaaggctcgcctgaactgctcccgtcctggggaagtccccttttactacaacgaattgcagagtactttcttcctgcctgagctggatttgatctatggcatctttaccaccaatgtgaacagcattgcggcctcagctgtgtgcgtcttcaacctgagcgccatcgcgcaggccttctctgggcccttcaagtaccaagaaaactcgcgctcggcctggctaccgtatcccaacccaaacccccacttccagtgtggcaccgtggaccagggcctgtacgtgaacctgaccgagagaaatctgcaggatgctcagaagttcattctggtgcatgaggtggtacagccagtgaccacagtgccctccttcatggaggacaatagccgcttttcccacgtggcagtcgacgtggtgcagggcagagaagcgctcgtccacatcatctatttggccacagattacggaaccattaagaaagtgcgggtacccctgaatcagacctcaagcagctgtttgctggaagagattgagctcttccctgagaggcggagggagcccatcaggagcctgcagatcctgcacagccagagtgtcctgttcgtggggctgcgggagcacgtggtcaagatccccctgaagaggtgccagttctaccgcacacgcagcacctgcattggggcccaggacccttactgtggctgggatgtggtaatgaagaaatgcacaagcctggaggagagcctgagcatgacgcagtgggaacagagcatctctgcgtgtccgaccaggaatctcaccgtggatgggcactttggtgtgtggtctccgtggacgccttgcacgcacacagatggcagcgccgtgggatcctgcctctgtcgaacccgctcctgcgacagcccggccccgcagtgtggtggctggcagtgcgagggccctggcatggagatcgccaactgttccaggaacggaggctggactccctggacctcgtggtctccctgcagcactacctgtgggatcggcttccaggtgcggcagcgctcctgcagcaaccccactcccaggcacgggggccgggtgtgcgtgggacagaaccgcgaggaaagatactgcaatgaacatttgctatgtcccccacacatgttctggacaggctggggtccttgggaacggtgcacagcccaatgcgggggtggcattcaagctcgccgcaggatctgtgagaatgggcctgactgtgcaggctgcaatgtggagtaccagtcttgcaacaccaacccgtgtcctgagctgaagaagaccacgccctggacaccctggacacctgtcaacatctctgacaacggcgaccactatgagcaacgattccgatacacatgcaaagcccgcctggctgatccgaatttgctggaagtgggaagacagagaatcgaaatgcggtactgttctagcgacggcaccagtggctgctccacagatgggctttctggggatttcctgcgtgctgggagatactctgcccacacggtcaacggggcttggtcagcctggacgtcgtggtcacagtgcagccgtgactgcagcaggggcattcggaaccggaagcgtgtttgcaacaaccccgaacccaagtatgggggaatgccttgccttggcccatctctggaataccaggaatgcaacactttgccctgcccagtggatggcgtgtggtcttgctggtccccctggacaaaatgttcagcaacatgcggcggtggacactatatgaggacccgctcttgctccaatccagccccggcctatggaggggacatctgcctggggctgcacacagaagaggcactctgcaacacgcagccctgcccagagagctggtcggagtggtcggactggtctgagtgtgaagcctctggcgtccaagtccgcgcccgccagtgcatcctcctgttccccatgggcagccagtgctccgggaacaccacggagagccggccgtgtgtgtttgactctaatttcatcccagaagtatctgtggcaagatccagtagcgtagaagagaaaaggtgtggagagttcaacatgttccacatgatcgccgtggggctgagcagctccatcctcggctgcctcctcaccctgctcgtctatacttactgccagcggtaccagcagcaatcccacgatgcgactgtcatccaccccgtctcacctgccccccttaataccagcataaccaaccacatcaacaaactggacaagtacgactcggtggaggccatcaaggcatttaacaaaaacaacttgatcctagaggaaagaaacaaatacttcaacccacatctcactgggaagacctattctaatgcctactttacagatctcaataattatgatgagtactaacagctttcatgttttgggcttcttgtaaatccccagttcctcaaggcctgtgccccatgactgcccatgtttctgaggcttcagagtcgaagtttggatacatttcaagtgcatttcaagccaccagagtgtcccattggtgccaaaaatacacgtctttaaaagcaacaaaaattgaaataagacatcgtgaaaatcttgaccattgttgattgagccagggtggtgaagtttttaattggtgttcatcctatttttctgacaagtccattggtttgttttttgagcattattttataaatgtgccacccacattggaaggagtctttctttagaactttggagtgtaaatcttcatgatgttgtaaattcaagaaaataggcactttctctgaaagacctgctccttccacaagaagtgcataggtccataatatttcataaaatgaagaaaaagaatgtggccaaacaattattcaccatggattgcccaactttccaaatctggataaagctgtgggattcttggaagcagcttgagtgttttcatcttgcctgggaagcccaggaattccacctggtccacaccggcagaagttacagtagactgtgaggcaccccaccttgctcctgatgcagtttctgtgccattgctggtgctggtggaggcagcggagcagaggctcaggcacaatgaagcgtggatgtgttctgcaggttgctgcaaaactcaccttattctgacttttggatttcatggcattccaggaagctccttgccatgctgttggcctggaagtccacctgtctggtccatagtgacgtcctgaagagccagtctgtaaaataaccaaccacttacttagcgtttggatagactccatgccttctctctccctgcaaagaaaaatcttgaacatttatgatgtcaattagtgaaagtattgaaaatactaaattataactaaaagcaactttttatgttattgaaaatattgaaagaactgatattaatgataatcattttatttttcatctctctgatatacccaatgtgtggcaatcagcccctaccatgagcattaatgccatgtaaagctggctttctggagtctgccaggtccacacgaagtgctacccccagtttctgctgttacttgctgcctccaggccaggggagcaggagatgctcagctctggtgccttttcttttatttcagtgctgccttcccacccacccagtccattcaccctcacctctccctgcatggaggcaacagcatttccaagatgtaccttgggaagtcaggatagctggaagtaagggtttttggggatccctgtggtctcttcactgatcatcgataagcatttaagagtgtgctaacaccattcacagaggtccctggaaaaaaatatataattttctcacaaacaaccaatacataacctatggcagttggttgaataattattgaaaaaaagaacacgactgaaaaagttcatctgatgcctctgagcatgtgataaagtcctgggtagacatggaaacgtgttcttacaaatgaaccttcggatctatgaaagaaaatatagtagggggactaaggaacatagaattttattagcatatgtgattttacccttatctttgtttctaatttaaagaaacaatttcagaaagtgttagaagaattctatgtttaataatgaatattgttgagttcaaaatattctcatatacccagatttacagagatgacacagtattgaaatggcaggtgggctctgtaagttatttggggattaatgaaatccagggtcttggcaggggggactcaatgtggccctctcactcatccctcatatgtcaagagtccttcctgtcttatatgcacatgctccaaggtccatactcagtagggggaaatctagccggatggttccccaattgttcctcggctggattttcatcatcagaaatttccaactcatctcatcagttttcttgtaagaaaaaaacatttttcactttgtagcacaattttagttatttttgagtcttcttccctaatagtttgtaagcttaaagggacaattttaattttcccctggttaaagagggattctaatatttccaagaatgttttccactggaattgatgggaaatggtttctaaatggcatcgaagctggtctttaatgatcttttgcaatgacttgggaaaaacaccctccctcactacaggatcttcatgttgttaataatataaacaaacctttgaaattagcattgcaaaagaatcccatttttgtttcgtaccacactgttcaaaggaaaattgtttatctctcttcctttctctctctctcttatttgacagaatagcaagtgtttagataatttcagatatattcctaagtattttaccagctgtggaataagttgtgtttgtccatcactgtgtagctaccgttcacatgttctggctctgtactccacgcttatcgcgtgaaccctcacatgttggactttcacagtgtgatctctcacctgtcttggaaactccttcataaagccgctcttccttaggcctgggctgtttggaagtcctggtgaaactttgcggttcacattttaaattcctgaatgaccttttcattctctctttctttatctttgtttttgtccttcattccctccttttgttcttccttcctgcctttcacgtcacctacttatccgactatttcctccatttgcttcttttctatttgccatcacctgtgacccgagtggaacaaaaaccaacacatagttttaagctacacctttctgcacctgatgtaaaatgacattaatccactatttaacttctaaaattatttctgaatacagttgcagataggctggttttcatgaggaagctcgcttggctttagtcttacatttaaattctttgaaagtggctcccagtgctattcagggtcctttcttgaggccagactcatcaccatctactattgattttacagtgcactgacagtttacaggaaggagaagaacagaatttctgcacactacacaacatgtgggcttcctgtagctccagggacatgtagctttggtgaaactggggttttgtaacctctgaatgatatggacttagtgaattctaaggaactcagggggcacgtggtcaggctccaccgcacagaagagccacagtctccagactcatggcgttccctccagaactccccattcccctctgagcatatttctatgctgctgcttcttgtgacttacatgaggcatctcagcttcttcatgtttgtagggatggttccctaagcctgttcaagtaggctctcactagagttaccattcatatttgagaagaaaagaacatttattaaatgtatgtgtggggctgaggttctaaaggaattgaaaagagacgataaacattgaatgagggtgagggcatccctgctggggagaaacctctgtcccctaggaagagtccgttcatgtcatgtggtttgggatgaaccaggggtctgcccccatcgggtcacaggtgatgccaaatagaaaagaagcaaatggaggaaatagtcggataagtaggtgacgtgaaaggcaggacctggtcaccccagcaagtgctatggacagttcccggaaacggttgcccacttcacaggtccatgggtctgacccttggactctgccaggatcaactgcccagagtgccagagttttagccaaaggtgtacttacttccttatttatctccaaaaggatggaaactgtgggagtcaaagcctattttgctgagtgttcccactggatcctctgtagaattagcaggtcatgctgtcaaaatcatggacaaaggctgggtgcagtggctcatgcctataatcccagcactttgggaggccaaggtgggcggatcacctgagctcaggagtttaagaccagcctgggcaacatggggaaactccatctctacaaaatatacaaaatattagccagccatcgtggtgcgtgcctgtggtcccagtttcttgggaggctgaggcgggagtatcatttgagccaggaggttgaggttgcagtgagctgagatcacatcactgcactccatcctgggtgacagagagagaccctgtctcaaaaaaaaa

SEQ ID NO: 98 - DNA, 8056 bp, Homo sapiens; identical to SEQ ID NO: 97

SEQ ID NO: 99 - DNA, 2220 bp, Homo sapiens
atgcctgggaagatggtcgtgatccttggagcctcaaatatactttggataatgtttgcagcttctcaagcttttaaaatcgagaccaccccagaatctagatatcttgctcagattggtgactccgtctcattgacttgcagcaccacaggctgtgagtccccatttttctcttggagaacccagatagatagtccactgaatgggaaggtgacgaatgaggggaccacatctacgctgacaatgaatcctgttagttttgggaacgaacactcttacctgtgcacagcaacttgtgaatctaggaaattggaaaaaggaatccaggtggagatctactcttttcctaaggatccagagattcatttgagtggccctctggaggctgggaagccgatcacagtcaagtgttcagttgctgatgtatacccatttgacaggctggagatagacttactgaaaggagatcatctcatgaagagtcaggaatttctggaggatgcagacaggaagtccctggaaaccaagagtttggaagtaacctttactcctgtcattgaggatattggaaaagttcttgtttgccgagctaaattacacattgatgaaatggattctgtgcccacagtaaggcaggctgtaaaagaattgcaagtctacatatcacccaagaatacagttatttctgtgaatccatccacaaagctgcaagaaggtggctctgtgaccatgacctgttccagcgagggtctaccagctccagagattttctggagtaagaaattagataatgggaatctacagcacctttctggaaatgcaactctcaccttaattgctatgaggatggaagattctggaatttatgtgtgtgaaggagttaatttgattgggaaaaacagaaaagaggtggaattaattgttcaagagaaaccatttactgttgagatctcccctggaccccggattgctgctcagattggagactcagtcatgttgacatgtagtgtcatgggctgtgaatccccatctttctcctggagaacccagatagacagccctctgagcgggaaggtgaggagtgaggggaccaattccacgctgaccctgagccctgtgagttttgagaacgaacactcttatctgtgcacagtgacttgtggacataagaaactggaaaagggaatccaggtggagctctactcattccctagagatccagaaatcgagatgagtggtggcctcgtgaatgggagctctgtcactgtaagctgcaaggttcctagcgtgtacccccttgaccggctggagattgaattacttaagggggagactattctggagaatatagagtttttggaggatacggatatgaaatctctagagaacaaaagtttggaaatgaccttcatccctaccattgaagatactggaaaagctcttgtttgtcaggctaagttacatattgatgacatggaattcgaacccaaacaaaggcagagtacgcaaacactttatgtcaatgttgcccccagagatacaaccgtcttggtcagcccttcctccatcctggaggaaggcagttctgtgaatatgacatgcttgagccagggctttcctgctccgaaaatcctgtggagcaggcagctccctaacggggagctacagcctctttctgagaatgcaactctcaccttaatttctacaaaaatggaagattctggggtttatttatgtgaaggaattaaccaggctggaagaagcagaaaggaagtggaattaattatccaagttactccaaaagacataaaacttacagcttttccttctgagagtgtcaaagaaggagacactgtcatcatctcttgtacatgtggaaatgttccagaaacatggataatcctgaagaaaaaagcggagacaggagacacagtactaaaatctatagatggcgcctataccatccgaaaggcccagttgaaggatgcgggagtatatgaatgtgaatctaaaaacaaagttggctcacaattaagaagtttaacacttgatgttcaaggaagagaaaacaacaaagactatttttctcctgagcttctcgtgctctattttgcatcctccttaataatacctgccattggaatgataatttactttgcaagaaaagccaacatgaaggggtcatatagtcttgtagaagcacagaaatcaaaagtgtag

SEQ ID NO: 100 - DNA, 6227 bp, Homo sapiens
cgcgccgccgctcgctcacctgcgctcccgcccgcccctcggtgcgcgcccggcccgccagccgccgccgcccgcaccccgagcgccaccatgaactcgctcttcaggaagagaaacaaaggcaaatacagccccactgtgcagacccggagcatctctaacaaggagctctcggagctgatcgagcagctgcagaagaatgccgaccaggtggagaagaacatcgtggacacagaggccaagatgcagagtgacctggctcggctgcaggagggtcggcagcctgagcaccgggacgtgaccctgcagaaggtgttggactctgagaagctgctctatgtgctagaggcggatgcggccattgccaagcacatgaagcacccacagggggacatgatcgccgaggatatccgccagctgaaggagcgtgtgaccaacctgcgcgggaaacacaagcagatctacaggctggcggtgaaggaagtggatccacaggtcaactgggcggcactggtggaggagaagctggacaagctgaacaaccagagctttgggactgacctgccgctggtggaccaccaagtggaggagcataacatcttccacaatgaggtcaaggccatcgggccccacctggccaaggacggggacaaggagcagaacagcgaactccgggccaagtaccagaaactgctggcagcatcacaggcccggcagcagcacctgagttcgctgcaggactacatgcagcgctgcaccaatgagctgtactggctggaccagcaggccaagggccgcatgcagtacgactggagtgaccgcaacctcgactaccccagccgccggcgccagtatgagaatttcatcaaccggaacctggaggccaaagaggagagaatcaacaaactgcacagcgagggcgaccagctgctggcggccgagcaccccgggaggaactccattgaggcgcacatggaggctgtgcacgcagactggaaggagtacctgaacctgctcatctgcgaggagagccacctcaagtacatggaggactaccaccagtttcacgaagacgtgaaggacgctcaggagctgctgcgcaaggtggactcggacctgaaccagaagtatggccctgacttcaaggaccggtaccagattgagctgctgctgcgggagctggatgaccaggagaaggtgctggacaagtatgaggacgtggtgcaggggctgcagaagcgaggccagcaggtggtgcccctcaagtaccgccgggagactccgctcaagcccatccccgtggaggcactctgtgactttgagggggagcagggcctgatctcgcggggctacagctacaccctgcagaagaacaacggggagagctgggagctcatggacagcgctgggaacaagctgattgctccggccgtgtgttttgtgatcccccccacagaccctgaggccctggctctggctgacagcctgggcagccagtaccggagcgtgcggcagaaggcagctgggagcaaacgcacgctgcagcagcggtatgaggtgctgaagaccgagaatcccggagatgcctctgacctacaggggcggcagctgctggctggcttggacaaggtggccagcgacctggaccggcaggagaaggccatcacagggatcctgcggccaccactggagcaaggccgggctgtgcaggacagtgccgagcgggccaaggacctcaagaacatcaccaacgagctactgcggattgaacctgagaagacgcggagcacggctgagggcgaagccttcatccaggccctcccaggcagtggcaccacacccctgctgaggacccgggtggaggacaccaaccggaaatacgagcacctcctgcagctgctggacttggcccaggagaaggttgatgtggccaaccgcctggagaagagcctgcagcagagctgggagttgctggccacacacgagaaccatctgaatcaggatgacacagtgcctgagagcagccgtgtcctggacagcaaggggcaggagctggcggccatggcctgtgagttacaggcccagaagtccctcctgggtgaggtggagcagaacttgcaggcggccaagcagtgctcgagcacactggccagccgcttccaggagcactgtccggacctggagcgccaggaggccgaggtgcacaagctgggccagcgtttcaacaacctgcgccagcaggtggaacgcagggcgcagagcctacagagcgccaaggcagcctacgagcacttccaccgcggccatgaccacgtgctgcagttcctagtcagcatccccagttacgagccccaggagacagacagcctcagccagatggagaccaagctgaagaaccagaagaacctgctagatgagatagcaagtagggagcaggaagtacagaagatctgtgccaattcccagcagtaccagcaagctgtaaaggactatgagttagaagcagaaaaactaaggtctcttctcgacttggagaatggaaggagaagccacgtgagcaagagagccaggctccaatctcctgccaccaaagtgaaggaagaggaagcagcacttgccgccaagttcactgaagtttatgccatcaacagacagaggctgcagaatctggagtttgctctgaatctcctcagacagcagccggaagtagaagtgacccatgagaccctgcaaaggaataggccggactctggagtggaggaggcgtggaagatcaggaaggaactggatgaggagactgagcggaggcggcagctggagaacgaggtcaagagcacccaggaagaaatctggaccttgaggaatcaggggcctcaggaatcggtggtgaggaaggaggtgctcaagaaggtgccggatcccgtgctggaggagagcttccagcagctgcagcggacgctggcagaggagcagcacaagaaccagctgctgcaggaggagctggaggcactgcagctgcagctgcgtgccctggagcaggagaccagagacggggggcaggagtacgtggtcaaggaggtcctgcgcatcgagcctgacagggcccaggcggatgaggtcttgcagctgcgggaggagctggaggcactgaggcggcagaagggcgcccgggaggcagaggtgctcctcctgcagcagcgtgtggccgccctggctgaagagaagagccgggcgcaggagaaggtcacagagaaagaggtggtgaaactgcagaatgacccccagctggaggcagagtaccagcagctgcaggaggaccaccagcgccaggaccagctcagggagaagcaggaggaggagctgagcttcctccaggacaagctcaagaggctagagaaggagcgggccatggccgagggcaagatcaccgtcaaggaggtgctcaaggtggagaaggacgcggccaccgagagggaggtcagcgatctcacccgccaatatgaggacgaggctgccaaggctcgcgctagccagagggagaagacggagctgctccgaaagatatgggccttggaggaggagaacgccaaagtggtggtgcaggagaaggtgcgggagatcgtgcggccagaccccaaggcggaaagtgaagtggcgaacctccgcctggagcttgtggagcaggagcgaaagtaccggggtgccgaggagcagctccggagctaccagagtgagctggaggccctcaggaggcgaggcccccaggtggaagtcaaagaggtgactaaggaagtcattaagtacaagactgaccctgagatggagaaggagcttcagcggctcagggaggagatcgtggacaagaccagactgatcgaaaggtgtgatttagagatctaccagctgaaaaaggaaatccaggccctgaaagacaccaaaccccaggtccagaccaaagaggtggtccaggagatcctccaattccaagaagaccctcaaaccaaggaggaggtggcgtctctgagggcaaagctctcagaggagcagaagaaacaagtggatctggagagggaaagagcttcccaggaagagcagatcgcccggaaagaggaggagctctcgcgggtgaaggaaagggtggtgcagcaggaggtggtcaggtatgaggaggagccaggcctgcgggccgaggcgagcgcctttgccgagagcatcgatgtggagctgcggcagattgacaagctgcgggcagagctgcggcggctgcagcgccggcgcaccgagcttgagcggcagctggaggagctagagcgcgagcggcaggcccgcagggaggccgagcgcgaggtacagcggttgcagcagcggctggcagcgctggagcaggaagaagctgaggcccgtgagaaggtaacccatacgcagaaggtggtgctgcagcaggacccgcagcaggcgcgagagcatgccctgctccgactccagctggaagaagagcagcaccggcggcagctcctggagggggagctcgagaccctccggaggaaactggctgcactggagaaggcggaggtcaaggagaaggtggtgctctccgagagtgtccaggtggagaagggcgacaccgagcaagagatccagaggctcaagagcagcctggaggaggagagccgcagcaagcgcgagctggacgtcgaggtgagccggctggaagccaggctttcggagctggaattccataactccaagtcatccaaggaactagactttctgagggaagagaaccacaaattacagctggagaggcaaaacctgcagctggagacccgaaggctccaatcggaaatcaacatggcagcgacggaaacacgagacctgcggaacatgaccgtggcggactctgggaccaaccatgactccagactgtggtccctggagagggaactggatgacctcaagaggctctccaaggacaaagacctcgagatcgacgagctgcagaagcgcctgggctccgtggccgtcaagcgggagcagcgggagaaccacctgcggcgctccatcgtagtcatccaccctgacacaggccgcgagctgtccccggaggaagcccaccgtgccgggctcattgactggaacatgttcgtgaaactcagaagccaggagtgcgactgggaggagatctcagtgaagggtcccaatggggagtcctcagtgatacacgacaggaagtctggcaagaagttctccatcgaagaggccctgcagagtggcaggctgacccctgctcagtatgaccgctatgtcaacaaggatatgtccatccaggagctggcggtcttggtatctgggcagaagtaggcacagctcttgcaactcttcgtaacggcagacgctggccctctcctacgacgcagtgacctccttggtgtcgtcctctcccttgccctggtgcaggccaagcattttatacataccctcgctgccaggctgctcagagtcccgcccacatatgagacaggcactggctgaagacaggcaactctcgtcccaaccatcattcaccctgagtgacgtacttcatcctccaatgactggacaactgcgatgccttttcctcccttttcctgtacactcccagcaacaaactcctcatgataactgcacacaatctgaaaaccactgaaggacaagccaaccacagcagccaagcccactccttgcagcatgggtactggtggcacaccagacagtgacactgccccacaaaggcctgggcccgtgggggctgctgcctggcatgacatctctccagatttctggcttaaaaccaactttccatccgagaagcctcctcagtagttactctgctcatgagacagatctgggctccaagccaggaaaggtgaacagaaaccacaagtgtccagccctcggtgctggagtggacgttaattgtcagccaccagactgtcccggcacctacagagaatgtttcacagttctggcatttaaatcctttgatagtggattgtgctgctgttagccttagtttcagtgctttacaagtctcgcttattatctcactggtatttaggtatacaaaacagttgattattcaccacgccaatatctgggtctctgtatctcatgtagaacataagaaaatgggaactaatagggaaatttatttatagcatgaaaataaacctggtggctggagtctg

SEQ ID NO: 101 - DNA, 6256 bp, Homo sapiens
cgcgccgccgctcgctcacctgcgctcccgcccgcccctcggtgcgcgcccggcccgccagccgccgccgcccgcaccccgagcgccaccatgaactcgctcttcaggaagagaaacaaaggcaaatacagccccactgtgcagacccggagcatctctaacaaggagctctcggagctgatcgagcagctgcagaagaatgccgaccaggtggagaagaacatcgtggacacagaggccaagatgcagagtgacctggctcggctgcaggagggtcggcagcctgagcaccgggacgtgaccctgcagaaggtgttggactctgagaagctgctctatgtgctagaggcggatgcggccattgccaagcacatgaagcacccacagggggacatgatcgccgaggatatccgccagctgaaggagcgtgtgaccaacctgcgcgggaaacacaagcagatctacaggctggcggtgaaggaagtggatccacaggtcaactgggcggcactggtggaggagaagctggacaagctgaacaaccagagctttgggactgacctgccgctggtggaccaccaagtggaggagcataacatcttccacaatgaggtcaaggccatcgggccccacctggccaaggacggggacaaggagcagaacagcgaactccgggccaagtaccagaaactgctggcagcatcacaggcccggcagcagcacctgagttcgctgcaggactacatgcagcgctgcaccaatgagctgtactggctggaccagcaggccaagggccgcatgcagtacgactggagtgaccgcaacctcgactaccccagccgccggcgccagtatgagaatttcatcaaccggaacctggaggccaaagaggagagaatcaacaaactgcacagcgagggcgaccagctgctggcggccgagcaccccgggaggaactccattgaggcgcacatggaggctgtgcacgcagactggaaggagtacctgaacctgctcatctgcgaggagagccacctcaagtacatggaggactaccaccagtttcacgaagacgtgaaggacgctcaggagctgctgcgcaaggtggactcggacctgaaccagaagtatggccctgacttcaaggaccggtaccagattgagctgctgctgcgggagctggatgaccaggagaaggtgctggacaagtatgaggacgtggtgcaggggctgcagaagcgaggccagcaggtggtgcccctcaagtaccgccgggagactccgctcaagcccatccccgtggaggcactctgtgactttgagggggagcagggcctgatctcgcggggctacagctacaccctgcagaagaacaacggggagagctgggagctcatggacagcgctgggaacaagctgattgctccggccgtctgttttgtgatcccccccacagaccctgaggccctggctctggctgacagcctgggcagccagtaccggagcgtgcggcagaaggcagctgggagcaaacgcacgctgcagcagcggtatgaggtgctgaagaccgagaatcccggagatgcctctgacctacaggggcggcagctgctggctggcttggacaaggtggccagcgacctggaccggcaggagaaggccatcacagggatcctgcggccaccactggagcaaggccgggctgtgcaggacagtgccgagcgggccaaggacctcaagaacatcaccaacgagctactgcggattgaacctgagaagacgcggagcacggctgagggcgaagccttcatccaggccctcccaggcagtggcaccacacccctgctgaggacccgggtggaggacaccaaccggaaatacgagcacctcctgcagctgctggacttggcccaggagaaggttgatgtggccaaccgcctggagaagagcctgcagcagagctgggagttgctggccacacacgagaaccatctgaatcaggatgacacagtgcctgagagcagccgtgtcctggacagcaaggggcaggagctggcggccatggcctgtgagttacaggcccagaagtccctcctgggtgaggtggagcagaacttgcaggcggccaagcagtgctcgagcacactggccagccgcttccaggagcactgcccggacctggagcgccaggaggccgaggtgcacaagctgggccagcgtttcaacaacctgcgccagcaggtggaacgcagggcgcagagcctacagagcgccaaggcagcctacgagcacttccaccgcggccatgaccacgtgctgcagttcctagtcagcatccccagttacgagccccaggagacagacagcctcagccagatggagaccaagctgaagaaccagaagaacctgctagatgagatagcaagtagggagcaggaagtacagaagatctgtgccaattcccagcagtaccagcaagctgtaaaggactatgagttagaagcagaaaaactaaggtctcttctcgacttggagaatggaaggagcagccacgtgagcaagagagccaggctccaatctcctgccaccaaagtgaaggaagaggaagcagcacttgccgccaagttcactgaagtttatgccatcaacagacagaggctgcagaatctggagtttgctctgaatctcctcagacagcagccggaagtagaagtgacccatgagaccctgcaaaggaataggccggactctggagtggaggaggcgtggaagatcaggaaggaactggatgaggagactgagcggaggcggcagctggagaacgaggtcaagagcacccaggaagaaatctggaccttgaggaatcaggggcctcaggaatcggtggtgaggaaggaggtgctcaagaaggtgccggatcccgtgctggaggagagcttccagcagctgcagcggacgctggcagaggagcagcacaagaaccagctgctgcaggaggagctggaggcactgcagctgcagctgcgtgccctggagcaggagaccagagacggggggcaggagtacgtggtcaaggaggtcctgcgcatcgagcctgacagggcccaggcggatgaggtcttgcagctgcgggaggagctggaggcactgaggcggcagaagggcgcccgggaggcagaggtgctcctcctgcagcagcgtgtggccgccctggctgaagagaagagccgggcgcaggagaaggtcacagagaaagaggtggtgaaactgcagaatgacccccagctggaggcagagtaccagcagctgcaggaggaccaccagcgccaggaccagctcagggagaagcaggaggaggagctgagcttcctccaggacaagctcaagaggctagagaaggagcgggccatggccgagggcaagatcaccgtcaaggaggtgctcaaggtggagaaggacgcggccaccgagagggaggtcagcgatctcacccgccaatatgaggacgaggctgccaaggctcgcgctagccagagggagaagacggagctgctccgaaagatatgggccttggaggaggagaacgccaaagtggtggtgcaggagaaggtgcgggagatcgtgcggccagaccccaaggcggaaagtgaagtggcgaacctccgcctggagcttgtggagcaggagcgaaagtaccggggtgccgaggagcagctccggagctaccagagtgagctggaggccctcaggaggcgaggcccccaggtggaagtcaaagaggtgactaaggaagtcattaagtacaagactgaccctgagatggagaaggagcttcagcggctcagggaggagatcgtggacaagaccagactgatcgaaaggtgtgatttagagatctaccagctgaaaaaggaaatccaggccctgaaagacaccaaaccccaggtccagaccaaagaggtggtccaggagatcctccaattccaagaagaccctcaaaccaaggaggaggtggcgtctctgagggcaaagctctcagaggagcagaagaaacaagtggatctggagagggaaagagcttcccaggaagagcagatcgcccggaaagaggaggagctctcgcgggtgaaggaaagggtggtgcagcaggaggtggtcaggtatgaggaggagccaggcctgcgggccgaggcgagcgcctttgccgagagcatcgatgtggagctgcggcagattgacaagctgcgggcagagctgcggcggctgcagcgccggcgcaccgagcttgagcggcagctggaggagctagagcgcgagcggcaggcccgcagggaggccgagcgcgaggtacagcggttgcagcagcggctggcagcgctggagcaggaagaagctgaggcccgtgagaaggtaacccatacgcagaaggtggtgctgcagcaggacccgcagcaggcgcgagagcatgccctgctccgactccagctggaagaagagcagcaccggcggcagctcctggagggggagctcgagaccctccggaggaaactggctgcactggagaaggcggaggtcaaggagaaggtggtgctctccgagagtgtccaggtggagaagggcgacaccgagcaagagatccagaggctcaagagcagcctggaggaggagagccgcagcaagcgcgagctggacgtcgaggtgagccggctggaagccaggctttcggagctggaattccataactccaagtcatccaaggaactagactttctgagggaagagaaccacaaattacagctggagaggcaaaacctgcagctggagacccgaaggctccaatcggaaatcaacatggcagcgacggaaacacgagacctgcggaacatgaccgtggcggactctgggaccaaccatgactccagactgtggtccctggagagggaactggatgacctcaagaggctctccaaggacaaagacctcgagatcgacgagctgcagaagcgcctgggctccgtggccgtcaagcgggagcagcgggagaaccacctgcggcgctccatcgtagtcatccaccctgacacaggccgcgagctgtccccggaggaagcccaccgtgccgggctcattgactggaacatgttcgtgaaactcagaagccaggagtgcgactgggaggagatctcagtgaagggtcccaatggggagtcctcagtgatacacgacaggaagtctggcaagaagttctccatcgaagaggccctgcagagtggcaggctgacccctgctcagtatgaccgctatgtcaacaaggatatgtccatccaggagctggcggtcttggtatctgggcagaagtaggcacagctcttgcaactcttcgtaacggcagacgctggccctctcctacgacgcagtgacctccttggtgtcgtcctctccctagccctggtgcaggccaagcattttatacataccctcgctgccaggctgctcagagtcccgcccacatatgagacaggcactggctgaagacaggcaactctcgtcccaaccatcattcaccctgagtgacgtacttcatcctccaatgactggacaactgcgatgccttttcctcccttttcctgtacactcccagcaacaaactcctcatgataactgcacacaatctgaaaaccactgaaggacaagccaaccacagcagccaagcccactccttgcagcatgggtactggtggcacaccagacagtgacactgccccacaaaggcctgggcccgtgggggctgctgcctggcatgacatctctccagatttctggcttaaaaccaactttccatccgagaagcctcctcagtagttactctgctcatgagacagatctgggctccaagccaggaaaggtgaacagaaaccacaagtgtccagccctcggtgctggagtggacgttaattgtcagccaccagactgtcccggcacctacagagaatgtttcacagttctggcatttaaatcctttgatagtggattgtgctgctgttagccttagtttcagtgctttacaagtctcgcttattatctcattggtatttaggtatacaaaacagttgattattcaccacgccaatatctgggtctctgtatctcatgtagaacataagaaaatgggaactaatagggaaatttatttatagcatgaaaataaacctggtggctggagtctgcttgtacggtcaaaaaaaaaaaaaaaaaa

SEQ ID NO: 102 - DNA, 6458 bp, Homo sapiens
gctgaccagccagtgaggacgcccgctgcctcccacctgccctcctgccgtctttcgccagccaagcccagcctgagccagcacttgcctttacgaccatgttcaaggggctgagcaaaggctcccaggggaaggggtcccccaagggctcccccgccaaggggtcccccaaaggctcccccagcaggcacagccgggctgccacccaggagctggcccttctcatctcccgcatgcaagccaacgccgaccaggtggagcgggacatcctggagacgcagaagaggctgcagcaggaccggctgaacagtgagcagagccaggccctgcagcaccagcaggagacgggccgcagcctgaaggaggctgaggtgctgctcaaggacctcttcctggacgtggacaaggcccggcggctcaagcacccgcaggctgaggagattgagaaggacatcaagcagctgcacgagcgggtgacccaggagtgtgcggagtaccgtgccctgtacgagaagatggtgctgccccccgacgtgggacccagggtcgactgggcacgcgtgctggagcagaaacagaagcaggtctgcgcaggccagtacgggccgggcatggcggagctggagcaacagatcgccgagcacaacatcctgcagaaggagatcgacgcctatgggcagcagctgcggagcctcgtggggccggatgcagccaccatccggagccaataccgagacctactgaaggcggcgtcgtggcgcgggcagagcctgggcagcctgtacacgcacctccagggctgcacgcggcagctgagcgccctggctgagcagcagcgccgcatcctgcagcaggactggagcgacctcatggccgaccctgcgggcgtgcggcgggagtacgagcacttcaagcagcacgagctgctgagccaggagcagagcgtgaaccagctggaggacgacggcgagcgcatggtggagctgcggcaccccgcggtggggcccatccaggcccaccaggaggccctgaagatggagtggcagaacttcctgaacctgtgtatctgccaggagacccagctgcagcacgtggaggactaccgccggttccaggaagaggccgactcagtcagccagaccctggcgaagctcaactccaacttggatgccaagtacagccctgcacctgggggcccccctggcgcccccacagagctgctgcaacagctggaggcagaggaaaaacggctggccgtcaccgagagggccactggggacctgcagcggcgaagccgggatgtggcccctctgccacagcgaagaaacccccctcagcagcccctgcacgtggacagcatctgcgactgggactcaggagaagtgcagctgctgcggggtgagcggtataagctggtagataacactgacccgcatgcctgggtcgtgcagggccctggcggggagaccaagcgtgctcccgccgcctgcttctgcatcccagcaccagaccctgatgctgtggccagggcctcccggctggcctcagagctgcaggccctgaagcagaaattggccacagtccagagccgcctgaaggccagtgctgtggagtctcttcggcccagccagcaggctccatctggctcagacctggccaacccacaggcccagaagctcctgacacagatgacccggctggatggagacctgggacagatagagaggcaggtgctggcctgggcgcgggccccgctgagccgccccacacccttggaggacttggagggccgcatccacagccatgagggcacagcccagcgcctgcagagcctgggaacggagaaggagacagcccagaaggagtgcgaggcgtttctgtccacgcggcccgtgggccccgctgccctgcagctgcccgtagccctcaacagcgtgaagaacaagttcagtgacgtgcaggttctgtgcagcctctacggggagaaagccaaggctgccctggatctggagcggcagatccaggatgcggacagggtcatccgaggcttcgaggccaccctggtgcaggaggcccccatccctgctgaaccgggggctctgcaggagagggtcagcgagctgcagcgccagcggagggagctgctggaacagcagacctgcgtgctgcggctacaccgcgcgctgaaggcctcggagcacgcatgcgctgccctgcagaacaacttccaggagttctgccaagacctgcctcgccagcagcgccaggtgcgagccctcaccgaccgctaccacgccgtaggggaccagctggacctgcagggagaaggtggtgcaggatgccgccctcacctaccagcagttcaagaactgcaaggataacctgagctcctggctggagcacctgccccgcagccaggtgcggcccagcgacggccccagccagatcgcctacaagctgcaggcgcagaagaggctgacgcaggagatccagagccgagagcgggacagggccacagcatcccacctctcccaggccctgcaggcagcgctccaggactatgagctccaggcagacacctaccgctgctctttggagcccaccctggcagtgtcagcccccaagagaccccgagtggctcccctgcaagagagcatccaagcccaggagaagaaccttgcaaaggcctatactgaggttgcagcagcacagcagcagctgctccagcagctggagtttgctagaaaaatgctggagaagaaggagctcagtgaggacatccgaaggacccatgatgcaaagcagggctccgagagccctgcccaagcagggagagagtcagaggccctgaaggcccagctggaagaggagaggaagcgggtggcccgggtgcagcatgagctggaggcgcagaggagccaactgctgcagctgaggacccagcggcccttggagaggctggaggagaaggaagtggtagagttctaccgggacccccagctggagggcagcctgtccagggtgaaggcccaggtggaggaggagggcaagcggcgggctggcctgcaggcagacctggaagtggcagcccagaaggtcgtgcagctggaaagcaagaggaagaccatgcagcctcatctgctgaccaaggaggtcacccaggtggagagggaccccggcctggacagccaggcggcccagctcaggatccagatccagcagctccgcggggaggatgccgtcatctcggcccggctggaagggctgaagaaggagctactggcccttgagaagagggaggtggacgtgaaggagaaggtcgtggtgaaagaggtagtcaaggtggagaagaatctggaaatggtcaaggcagcccaggctctgaggctgcagatggaggaggatgctgcgcggaggaagcaggcggaggaggctgtggccaagctacaggctcgcatcgaagacctggagcgggctatcagctcggtggagcccaaggtcatcgtgaaggaggtgaagaaggtggagcaggacccagggctcctccaggagtcctccaggctgaggagcctcctcgaggaggagaggaccaagaacgcgacgctggccagggagctgagcgacctgcacagcaagtacagcgtggtggagaagcagaggcccaaagtgcagctccaggagcgcgtccacgagatcttccaggtggatccggagacagagcaggagatcactcggctcaaggccaagctgcaggagatggcgggcaagaggagcggtgtggagaaggaggtggagaagctgctgcccgacctggaggtcctgcgggcccagaagcccacggtggagtacaaggaggtgacccaggaggtggtgaggcatgagaggagccccgaggtgctgcgtgagatcgaccgcctgaaggctcagctcaacgagctcgtcaacagccacgggcgctcccaggagcagctcatccgcctgcagggtgagcgcgacgagtggaggcgcgagcgggccaaggtggagaccaagacggtgagcaaggaggtggtgcgccacgagaaggacccggtgctggagaaagaagcagagcggctccgccaggaggtgcgggaggcggcccagaagaggcgggccgcggaggacgcggtgtacgagctgcagagcaagcgcctgctgctggagaggaggaagcccgaggagaaggtggtggtgcaggaggtggtggtcacccagaaggacccgaagctgcgcgaggagcacagccggctgagcgggagcctggatgaggaggtgggccggcggcgccagctagagcttgaggtgcagcagctgcgggccggcgtggaggagcaggagggcctgctcagcttccaggaggaccgcagcaagaagctggccgtggagagggagctgcggcagctgaccttgaggatccaggagctcgagaagcggcctcccacggtgcaggagaagatcatcatggaggaagtggtcaagctggagaaggacccggacctggagaagtccacggaagccctgcggtgggacctggaccaggagaagacccaggtaaccgagctgaatcgggagtgcaagaacctgcaggtccagattgacgtcctccagaaagccaaatcgcaggagaagaccatctacaaggaagtgatccgggtgcagaaggaccgcgtcctggaagatgagcgggcccgcgtgtgggagatgctcaacagggagcgcacggcccggcaggcccgggaggaggaggcacggcgcctgcgggagcgcattgaccgggccgagacgctggggagaacctggtcccgggaggagtccgagctgcagagggcccgggaccaggccgaccaggagtgtgggcggctgcagcaggagctgcgggctctggagaggcagaagcagcagcagacactgcagctgcaggaggagtcgaagctgctcagccagaagacggagagcgagcgacagaaggcggcccagcggggccaggagctctcgcggctggaggcggccatcctccgcgagaaggaccagatctacgagaaggagcggacgctccgggacctccacgccaaggtgagccgggaggagctcagccaggagacccagacgcgagagaccaacctttccaccaagatctccatcctggaacccgagacggggaaggacatgtccccatacgaggcctacaagaggggcatcatcgacaggggccagtacttgcagctgcaggagctcgagtgtgactgggaggaggtcaccacctcggggccctgtggggaggagtctgtgctcctggaccgcaagagcgggaagcagtactccatcgaggccgccctccgctgccggcgcatctctaaggaggagtaccatctgtacaaggacggccacctgcccatctccgagtttgcgctgcttgtagctggggagaccaagccaagctcctcactctccatcggctctatcatctccaagtccccgctcgcctccccggccccccagagcaccagtttcttctctcccagcttctctctcgggctcggtgatgacagcttccctatcgccgggatctatgacacaaccacagacaacaagtgcagcatcaagacggccgtggccaagaacatgctggaccccatcactgggcagaagctactggaggcccaggcggccacagggggcatcgtggacctgctcagccgtgagcgctactctgtgcacaaggcgatggagaggggcctgatcgagaacacctccacacagaggctgcttaacgcccagaaggccttcaccggcatcgaggaccccgtcaccaagaagaggctctcggtgggcgaggccgtccagaagggctggatgccccgggagagcgtgctcccacacctgcaggtgcagcacctgaccggggggctcatcgaccccaagaggacaggccgcatccccatccagcaggccctcctctccgggatgatcagtgaagagctggcccagctcctgcaggacgagtccagctacgagaaggatttgacagaccccatctccaaggaacggctgagctacaaggaggccatgggccgctgccgcaaagaccccctgagcggcctgctgctcctgccagcggcactggaggggtaccgctgctaccgctccgcctcccccaccgtcccgcgctcccttcgctgacacgggccaaggagccagtggggaagtgcgtgtgttgggccaggtaggatacgtacacctcttgcctcagagcagcctcatcccaggcagtgggtcttccctctgtccaaccactgttttattattttactaacatggtgatgggctccctcccctaaccttggtgcctgatccatccccagaccaggacagcagccactcagttcttcctccacctccacccagtgatcccaataaacgaattctgtctccctgtg

SEQ ID NO: 103 - DNA, 1721 bp, Homo sapiens
cggcgccagcagcggagccaacgcacccgagtttgtgtttgaggccaccctgaggatcgggacagctgttcctttgggctgcagaaactccgctgagcagaacttgccgccagaatgctcctcctgttgctgagtatcatcgtcctccacgtcgcggtgctggtgctgctgttcgtctccacgatcgtcagccaatggatcgtgggcaatggacacgcaactgatctctggcagaactgtagcacctcttcctcaggaaatgtccaccactgtttctcatcatcaccaaacgaatggctgcagtctgtccaggccaccatgatcctgtcgatcatcttcagcattctgtctctgttcctgttcttctgccaactcttcaccctcaccaaggggggcaggttttacatcactggaatcttccaaattcttgctggtctgtgcgtgatgagtgctgcggccatctacacggtgaggcacccggagtggcatctcaactcggattactcctacggtttcgcctacatcctggcctgggtggccttccccctggcccttctcagcggtgtcatctatgtgatcttgcggaaacgcgaatgaggcgcccagacggtctgtctgaggctctgagcgtacatagggaagggaggaagggaaaacagaaagcagacaaagaaaaaagagctagcccaaaatcccaaactcaaaccaaaccaaacagaaagcagtggaggtgggggttgctgttgattgaagatgtatataatatctccggtttataaaacctatttataacactttttacatatatgtacatagtattgtttgctttttatgttgaccatcagcctcgtgttgagccttaaagaagtagctaaggaactttacatcctaacagtataatccagctcagtatttttgttttgttttttgtttgtttgttttgttttacccagaaataagataactccatctcgccccttccctttcatctgaaagaagatacctccctcccagtccacctcatttagaaaaccaaagtgtgggtagaaaccccaaatgtccaaaagcccttttctggtgggtgacccagtgcatccaacagaaacagccgctgcccgaacctctgtgtgaagctttacgcgcacacggacaaaatgcccaaactggagcccttgcaaaaacacggcttgtggcattggcatacttgcccttacaggtggagtatcttcgtcacacatctaaatgagaaatcagtgacaacaagtctttgaaatggtgctatggatttaccattccttattatcactaatcatctaaacaactcactggaaatccaattaacaattttacaacataagatagaatggagacctgaataattctgtgtaatataaatggtttataactgcttttgtacctagctaggctgctattattactataatgagtaaatcataaagccttcatcactcccacatttttcttacggtcggagcatcagaacaagcgtctagactccttgggaccgtgagttcctagagcttggctgggtctaggctgttctgtgcctccaaggactgtctggcaatgacttgtattggccaccaactgtagatgtatatatggtgcccttctgatgctaagactccagaccttttgtttttgctttgcattttctgattttataccaactgtgtggactaagatgcattaaaataaac

SEQ ID NO: 104 - DNA, 3489 bp, Homo sapiens
  misc_feature (2599)..(2599): n is a, c, g, or t
  misc_feature (2815)..(2815): n is a, c, g, or t
ctgcagggccccaacaaccctcaccaaaggccaaggtggtgaccgacggacccacagcggggtggctgggggagtcgaaactcgccagtctccactccactcccaaccgtggtgccccacgcgggcctgggagagtctgtgaggccgcccaccgcttgtcagtagagtgcgcccgcgagccgtaagcacagcccggcaacatgcggtcttcagacaggaaagtggccgcgaatgggaccggggtgcccagcggctgtggggactctgtcctgcggaaaccgcggtgacgagcacaagctcggtcaactggatgggaatcggcctggggggctggcaccgcgcccaccagggggtttgcggcacttccctctgcccctcagcaccccacccctactctccaggaacgtgaggtctgagccgtgatggtggcaggaaggggccctctgtgccatccgagtccccagggacccgcagctggcccccagccatgtgcaaagtatgtgcagggcgctggcaggcagggagcagcaggcatggtgtcccctgaggggagacagtggtctgggagggagaggtcctggaccctgagggaggtgatggggcaatgctcagccctgtctccggatgccaaaggaggggtgcggggaggccgtctttggagaattccaggatgggtgctgggtgagagagacgtgtgctggaactgtccagggcggaggtgggccctgcgggggccctcgggagggccctgctctgattggccggcagggcaggggcgggaattctggcgggccaccccagttagaaaaagcccgggctaggaccgaggagcagggtgagggagggggtgggatgggtggggggtaacgggggaaactggggaagtggggaaccgaggggcaaccaggggaagatggggtgctggaggagagcttgtgggagccaaggagcaccttggacatctggagtctggcaggagtgatgacgggtggaggggctagctcgaggcagggctggtggggcctgaggccagtgaggagtgtggagtaggtgcccaggcatcgtgcagacagggcgacatcagctggggacgatgggcctgagctagggctggaaagaagggggagccaggcattcatcccggtcacttttggttacaggacgtggcagctggttggacgaggggagctggtgggcagggtttgatcccagggcctgggcaacggaggtgtagctggcagcagcgggcaggtgaggaccccatctgccgggcaggtgagtcccttccctccccaggcctcgcttccccagccttctgaaagaaggaggtttaggggatcgagggctggcggggagaagcagacaccctcccagcagaggggcaggatgggggcaggagagttagcaaaggtgacatcttctcggggggagccgagactgcgcaaggctggggggttatgggcccgttccaggcagaaagagcaagagggcagggagggagcacaggggtggccagcgtagggtccagcacgtggggtggtaccccaggcctgggtcagacagggacatggcaggggacacaggacagaggggtccccagctgccacctcacccaccgcaattcatttagtagcaggcacaggggcagctccggcacggctttctcaggcctatgccggagcctcgagggctggagagcgggaagacaggcagtgctcggggagttgcagcaggacgtcaccaggagggcgaagcggccacgggaggggggccccgggacattgcgcagcaaggaggctgcaggggctcggcctgcgggcgccggtcccacgaggcactgcggcccagggtctggtgcggagagggcccacagtggacttggtgacgctgtatgccctcaccgctcagcccctggggctggcttggcagacagtacagcatccaggggagtcaagggcatggggcgagaccagactaggcgaggcgggcggggcggagtgaatgagctctcaggagggaggatggtgcaggcaggggtgaggagcgcagcgggcggcgagcgggaggcactggcctccagagcccgtggccaaggcgggcctcgcgggcggcgacggagccgggatcggtgcctcagcgttcgggctggagacgagggtgagtttttccccctctgccaccctcagcccccacccgcccctccccacacaaccaacacgttctccccacacgactctctcgttctccccacagccaggtctccagctggggtggacgtgcccaccagctgccgaaggccaagacgccaggtccggtggacgtgacaagcaggacatgacatggtccggtgtgacggcgaggacagaggaggcgcgtccggccttcctggtgagcgtgtctgccctccctgcgtcaggacggccctgcccagaccgccccgcgccaccatctcactgccccgacctctgtcttctacagaacaccttaggctggtggggctgcggcaagaagcgggtctgtttctttacttcctccacggagtcggcacactatggctgccctctgggctcccagaacccacaacatgaaaggtgagggncttcctgccacacttggggtggggggcacgcgagaggagctgagtgggacctcaactccttccccatccacagaaatggtgctacccagctcaagcctgggcctttgaatccggacacaaaaccctctagcttggaaatgaatatgctgcactttacaaccactgcactacctgactcaggaatcggctctggaaggtgagcaccagcgctccttnggaagcctccaggcccccgagcaccctgcccccatcccacccacgtgtcgctatctctaggtgaagctagaggaaccagacctcatcagcccaacatcaaagacaccatcggaacagcagcgcccgcagcacccaccccgcaccggcgactccatcttcatggccaccccctgcggtggacggttgaccaccagccaccacatcatcccagagctgagctcctccagcgggatgacgccgtccccaccacctccctcttcttctttttcatccttctgtctctttgtttctgagctttcctgtctttccttttttctgagagattcaaagcctccacgactctgtttcccccgtcccttctgaatttaatttgcactaagtcatttgcactggttggagttgtggagacggccttgagtctcagtacgagtgtgcgtgagtgtgagccaccttggcaagtgcctgtgcagggcccggccgccctccatctgggccgggtgactgggcgccggctgtgtgcccgaggcctcaccctgccctcgcctagtctggaagctccgaccgacatcacggagcagccttcaagcattccattacgccccatctcgctctgtgcccctccccaccagggcttcagcaggagccctggactcatcatcaataaacactgttac

SEQ ID NO: 105 - DNA, 1485 bp, Homo sapiens
gctacctgttgggcttgtgggcagtgattgtacagagcctgtccattgggtgcagtcatgtagatctgaagccctgaaaagcctcatgtctgcatcccctttccaaggctgcttccctggtgtgtctgttctctcctctgtcccaggtgctgggagcgtcctcttcagcgtcttttcctagagctggtcaccactaggctgtcactataaattccttgaatataagtaacagttattaatgaacttctaaatttctaatttctctctctctctctcttttttttttttttgttgttgttaaaaagggcctactacattggcgctattcttaggacttctgcaacttttaaagtcttacttgtctttcttgttgcttttgtattaggagttccccgtgtgggtctagaactcccctttggtaatgcttctttgtttttttatggcccttctgttctcaggatggagagaacacagaagctactatccatgtcaggatttattctatttatatcttattacaataaaattagtggcactttattcataaatattcatgagcctgttaattgttagttgtcttcctgtagctgaatcaacaagttattttcaactcaattttatgacttgcgaaaaagcttttgccctgttgtgtaccataacatttaaaagaatggaaaatgactgaaatccaatttagattatttttagagtatttttccagcaaattcaatttattctgaaatttaaatccagatcttttctaatatggtattacaatgaaaagaataaagagaagatttgaattttcagtttcattttcaaaaactatttaccaaaacaaatggagaagaaacatccaaaagcacatttcatttctccaaactttgtgttttaaattatagttataaattgtaaggtaattttaaattgtccctcgtattatttctccacgtctgttttagtttaatgtctcctaagcttttctctcatagcgtagacctagggaagggatgggaagattgcccagtccccgatggctgcgcacacaggaggcggcggacgacaaggcaagtgagtttgcactgtcagccccagaccgtaagcttggctacactgatgtttttctttactaaggatactattcaaaaattaacattttcatctcagtaagtttttagaacatcaaaatgttttctgagctccaagtggctaggttgtaaaagttttataataatttgcaattaaaatacatgatacatattaatccattaaagactagtgggaatgtatcagccagagtagcaagtaatttttgttttataaatcatagtatctgtcatcttgcagtattaccaatgctgttgtaaattgaatttaaagtggtattaaaaaaaactgttaaacaatttttatctgtttgtatatcttactatagattatgtacaagtaacatctaaataaaattacacttttaaccctaaaacg

SEQ ID NO: 106 - DNA, 2088 bp, Homo sapiens
gaattcggcacgagcgcgcggcgaatctcaacgctgcgccgtctgcgggcgcttccgggccaccagtttctctgctttccaccctggcgccccccagccctggctccccagctgcgctgccccgggcgtccacgccctgcgggcttagcgggttcagtgggctcaatctgcgcagcgccacctccatgttgaccaagcctctacaggggcctcccgcgccccccgggacccccacgccgccgccaggaggcaaggatcgggaagcgttcgaggccgagtatcgactcggccccctcctgggtaaggggggctttggcaccgtcttcgcaggacaccgcctcacagatcgactccaggtggccatcaaagtgattccccggaatcgtgtgctgggctggtcccccttgtcagactcagtcacatgcccactcgaagtcgcactgctatggaaagtgggtgcaggtggtgggcaccctggcgtgatccgcctgcttgactggtttgagacacaggaaggcttcatgctggtcctcgagcggcctttgcccgcccaggatctctttgactatatcacagagaagggcccactgggtgaaggcccaagccgctgcttctttggccaagtagtggcagccatccagcactgccattcccgtggagttgtccatcgtgacatcaaggatgagaacatcctgatagacctacgccgtggctgtgccaaactcattgattttggttctggtgccctgcttcatgatgaaccctacactgactttgatgggacaagggtgtacagccccccagagtggatctctcgacaccagtaccatgcactcccggccactgtctggtcactgggcatcctcctctatgacatggtgtgtggggacattccctttgagagggaccaggagattctggaagctgagctccacttcccagcccatgtctccccagactgctgtgccctaatccgccggtgcctggcccccaaaccttcttcccgaccctcactggaagagatcctgctggacccctggatgcaaacaccagccgaggatgttacccctcaacccctccaaaggaggccctgcccctttggcctggtccttgctaccctaagcctggcctggcctggcctggcccccaatggtcagaagagccatcccatggccatgtcacagggatagatggacatttgttgacttggttttacaggtcattaccagtcattaaagtccagtattactaaggtaagggattgaggatcaggggttagaagacataaaccaagtttgcccagttcccttcccaatcctacaaaggagccttcctcccagaacctgtggtccctgattttggagggggaacttcttgcttctcattttgctaaggaagtttattttggtgaagttgttcccattttgagccccgggactcttattttgatgatgtgtcaccccacattggcacctcctactaccaccacacaaacttagttcatatgcttttacttgggcaagggtgctttccttccaataccccagtagcttttattttagtaaagggaccctttcccctagcctagggtcccatattgggtcaagctgcttacctgcctcagcccaggattttttattttgggggaggtaatgccctgttgttaccccaaggcttctttttttttttttttttttttgggtgaggggaccctactttgttatcccaagtgctcttattctggtgagaagaaccttaattccataatttgggaaggaatggaagatggacaccaccggacaccaccagacaataggatgggatggatggttttttgggggatgggctaggggaaataaggcttgctgtttgttttcctggggcgctccctccaattttgcagatttttgcaacctcctcctgagccgggattgtccaattactaaaatgtaaataatcacgtattgtggggaggggagttccaagtgtgccctccttttttttcctgcctggattatttaaaaagccatgtgtggaaacccactatttaataaaagtaatagaatcagaaaaaaaaaaaaaaaaaaa

SEQ ID NO: 107 - DNA, 2055 bp, Homo sapiens
gcgcgcggcgaatctcaacgctgcgccgtctgcgggcgcttccgggccaccagtttctctgctttccaccctggcgccccccagccctggctccccagctgcgctgccccgggcgtccacgccctgcgggcttagcgggttcagtgggctcaatctgcgcagcgccacctccatgttgaccaagcctctacaggggcctcccgcgccccccgggacccccacgccgccgccaggaggcaaggatcgggaagcgttcgaggccgagtatcgactcggccccctcctgggtaaggggggctttggcaccgtcttcgcaggacaccgcctcacagatcgactccaggtggccatcaaagtgattccccggaatcgtgtgctgggctggtcccccttgtcagactcagtcacatgcccactcgaagtcgcactgctatggaaagtgggtgcaggtggtgggcaccctggcgtgatccgcctgcttgactggtttgagacacaggagggcttcatgctggtcctcgagcggcctttgcccgcccaggatctctttgactatatcacagagaagggcccactgggtgaaggcccaagccgctgcttctttggccaagtagtggcagccatccagcactgccattcccgtggagttgtccatcgtgacatcaaggatgagaacatcctgatagacctacgccgtggctgtgccaaactcattgattttggttctggtgccctgcttcatgatgaaccctacactgactttgatgggacaagggtgtacagccccccagagtggatctctcgacaccagtaccatgcactcccggccactgtctggtcactgggcatcctcctctatgacatggtgtgtggggacattccctttgagagggaccaggagattctggaagctgagctccacttcccagcccatgtctccccagactgctgtgccctaatccgccggtgcctggcccccaaaccttcttcccgaccctcactggaagagatcctgctggacccctggatgcaaacaccagccgaggatgtacccctcaacccctccaaaggaggccctgcccctttggcctggtccttgctaccctaagcctggcctggcctggcctggcccccaatggtcagaagagccatcccatggccatgtcacagggatagatggacatttgttgacttggttttacaggtcattaccagtcattaaagtccagtattactaaggtaagggattgaggatcaggggttagaagacataaaccaagtctgcccagttcccttcccaatcctacaaaggagccttcctcccagaacctgtggtccctgattctggagggggaacttcttgcttctcattttgctaaggaagtttattttggtgaagttgttcccattctgagccccgggactcttattctgatgatgtgtcaccccacattggcacctcctactaccaccacacaaacttagttcatatgctcttacttgggcaagggtgctttccttccaataccccagtagcttttattttagtaaagggaccctttcccctagcctagggtcccatattgggtcaagctgcttacctgcctcagcccaggattctttattctgggggaggtaatgccctgttgttaccccaaggcttcttttttttttttttttttttgggtgaggggaccctactctgttatcccaagtgctcttattctggtgagaagaaccttacttccataatttgggaaggaatggaagatggacaccaccggacaccaccagacactaggatgggatggatggttttttgggggatgggctaggggaaataaggcttgctgtttgttctcctggggcgctccctccaacttttgcagattcttgcaacctcctcctgagccgggattgtccaattactaaaatgtaaataatcacgtattgtggggaggggagttccaagtgtgccctcctctcttctcctgcctggattatttaaaaagccatgtgtggaaacccactatttaataaaagtaatagaatcag

SEQ ID NO: 108 - DNA, 444 bp, Homo sapiens
  misc_feature (134)..(134): n is a, c, g, or t
  misc_feature (353)..(353): n is a, c, g, or t
  misc_feature (400)..(400): n is a, c, g, or t
ttttttttttttttgttcagtaattatcttttatttcattttctccccttcccacccctccccctcggatccagcagagggctgtggtggcggcggcgtccaagcgggcgcggacggcgtacacgagcgcgcantggtggagctggagaaggagttccattttaaccgctacctgtgccggcctcgcgttgtagagatggccaacctgctgaacctcagcgagcggcagatcaagatctctcctctcaccacgcgcctcctcctcagggtagaatccaagaagcgcccaaattaacacaccttacatctttgtaggtaattccccccaaatcttgattttttttttcctcaantatcggtttcttccacgaaacctaaactttcacaatcctcttccggngccacaaagaaggtgtcacgtgacccgaaagccaaacaccattg

SEQ ID NO: 109 - DNA, 2227 bp, Homo sapiens
gagagcccgaacaggaagagggtacagctttgtgcaggtcacatgcccactgcagccctccagcctctggtccccagagcggactttggaagctgaactgcttttgttgctggaagacttatgttataatttaccctgggtggaccagggtcgtacaaaagggcaacgctccccagtccccccactcccgaccccggaatcatgcatcggactacacggatcaaaatcacagagctgaacccccacctcatgtgtgccctctgcggggggtacttcatcgacgccaccactatcgtggagtgcctgcattccttctgcaaaacctgcatcgtgcgctacctggagaccaacaaatactgccccatgtgtgacgtgcaggtccataaaacccggccgctgctgagcatcaggtctgacaaaacacttcaagacattgtctacaaattggtccctgggctttttaaagatgagatgaaacggcggcgggatttctatgcagcgtaccccctgacggaggtccccaacggctccaatgaggaccgcggcgaggtcttggagcaggagaagggggctctgagtgatgatgagattgtcagcctctccatcgaattctacgaaggtgccagggaccgggatgagaagaagggccccctggagaatggggatggggacaaagagaaaacaggggtgcgcttcctgcgatgcccagcagccatgaccgtcatgcatcttgccaagtttctccgcaacaagatggatgtgcccagcaagtacaaggtggaggttctgtacgaggacgagccactgaaggaatactacaccctcatggacatcgcctacatctacccctggcggcggaacgggcctctccccctcaagtaccgtgtccagccagcctgcaagcggctcaccctagccacggtgcccaccccctccgagggcaccaacaccagcggggcgtccgagtgtgagtcagtcagcgacaaggctcccagccctgccaccctgccagccacctcctcctccctgcccagcccagccaccccatcccatggctctcccagttcccatgggcctccagccacccaccctacctcccccactcccccttcgacagccagtggggccaccacagctgccaacgggggtagcttgaactgcctgcagacaccatcctccaccagcagggggcgcaagatgactgtcaacggcgctcccgtgccccccttaacttgaggccagggaccctctcccttcttccagccaagcctctccactccttccactttttctgggcccttttttccacttcttctactttccccagctcttcccaccttgggggtggggggcgggttttataaataaatatatatatatatgtacataggaaaaaccaaatatacatacttattttctatggaccaaccagattaatttaaatgccacaggaaacaaactttatgtgtgtgtgtatgtgtggaaaatggtgttcattttttttggggggggtcttgtgtaatttgctgtttttgggggtgcctggagatgaactggatgggccactggagtctcaataaagctctgcaccatcctcgctgtttcccaaggcaggtggtgtgttgggggccccttcagacccaaagctttaggcatgattccaactggctgcatataggagtcagttagaattgtttctttctctccccgtttctctccccatcttggctgctgtcctgcctctgaccagtggccgccccccgcgttgttgaatgtccagaaattgctaagaacagtgccttttacaaatgcagtttatccctggttctgaggagcaagtgcagggtggaggtggcacctgcatcacctcctcctcttgcagtggaaactttgtgcaaagaatagatagttctgcctcttttttttttttttcctgtgtgtgtggcctttgcatcatttatcttgtggaaaagaagattcaggccctgagaggtctcagctcttggaggagggctaaggctttagcattgtgaagcgctgcacccccaccaaccttaccctcaccggggaaccctcactagcaggactggtggtggagtctcacctggggcctagagtggaagtgggggtgggttaacctcacacaagcacagatcccagactttgccagaggcaaacagggaattccgccgatactgacgggctccaggagtcgtcgccacactcg

SEQ ID NO: 110 - DNA, 3565 bp, Homo sapiens
gcagccgggcggccgcagaagcgcccaggcccgcgcgccacccctctggcgccaccgtggttgagcccgtgacgtttacactcattcataaaacgcttgttataaaagcagtggctgcggcgcctcgtactccaaccgcatctgcagcgagcaactgagaagccaagactgagccggcggccgcggcgcagcgaacgagcagtgaccgtgctcctacccagctctgcttcacagcgcccacctgtctccgcccctcggcccctcgcccggctttgcctaaccgccacgatgatgttctcgggcttcaacgcagactacgaggcgtcatcctcccgctgcagcagcgcgtccccggccggggatagcctctcttactaccactcacccgcagactccttctccagcatgggctcgcctgtcaacgcgcaggtaaggctggcttcccgtcgccgcggggccgggggcttggggtcgcggaggaggagacaccgggcgggacgctccagtagatgagtagggggctcccttgtgcctggagggaggctgccgtggccggagcggtgccggctcgggggctcgggacttgctctgagcgcacgcacgcttgccatagtaagaattggttcccccttcgggaggcaggttcgttctgagcaacctctggtctgcactccaggacggatctctgacattagctggagcagacgtgtcccaagcacaaactcgctaactagagcctggcttcttcggggaggtggcagaaagcggcaatcccccctcccccggcagcctggagcacggaggagggatgagggaggagggtgcagcgggcgggtgtgtaaggcagtttcattgataaaaagcgagttcattctggagactccggagcggcgcctgcgtcagcgcagacgtcagggatatttataacaaaccccctttcaagcaagtgatgctgaagggataacgggaacgcagcggcaggatggaagagacaggcactgcgctgcggaatgcctgggaggaaaagggggagacctttcatccaggatgagggacatttaagatgaaatgtccgtggcaggatcgtttctcttcactgctgcatgcggcactgggaactcgccccacctgtgtccggaacctgctcgctcacgtcggctttccccttctgttttgttctaggacttctgcacggacctggccgtctccagtgccaacttcattcccacggtcactgccatctcgaccagtccggacctgcagtggctggtgcagcccgccctcgtctcctctgtggccccatcgcagaccagagcccctcaccctttcggagtccccgccccctccgctggggcttactccagggctggcgttgtgaagaccatgacaggaggccgagcgcagagcattggcaggaggggcaaggtggaacaggtgaggaactctagcgtactcttcctgggaatgtgggggctgggtgggaagcagccccggagatgcaggagcccagtacagaggatgaagccactgatggggctggctgcacatccgtaactgggagccctggctccaagcccattccatcccaactcagactctgagtctcaccctaagaagtactctcatagtttcttccctaagtttcttaccgcatgctttcagactgggctcttctttgttctcttgctgaggatcttattttaaatgcaagtcacacctattctgcaactgcaggtcagaaatggtttcacagtggggtgccaggaagcagggaagctgcaggagccagttctactggggtgggtgaatggaggtgatggcagacacttttactgaatgtcggtctttttttgtgattattctagttatctccagaagaagaagagaaaaggagaatccgaagggaaaggaataagatggctgcagccaaatgccgcaaccggaggagggagctgactgatacactccaagcggtaggtactctgtgggttgctcctttttaaaacttaagggaaagttggagattgagcataagggcccttgagtaagactgtgtcttatgctttcctttatccctctgtatacaggagacagaccaactagaagatgagaagtctgctttgcagaccgagattgccaacctgctgaaggagaaggaaaaactagagttcatcctggcagctcaccgacctgcctgcaagatccctgatgacctgggcttcccagaagagatgtctgtggcttcccttgatctgactgggggcctgccagaggttgccaccccggagtctgaggaggccttcaccctgcctctcctcaatgaccctgagcccaagccctcagtggaacctgtcaagagcatcagcagcatggagctgaagaccgagccctttgatgacttcctgttcccagcatcatccaggcccagtggctctgagacagcccgctccgtgccagacatggacctatctgggtccttctatgcagcagactgggagcctctgcacagtggctccctggggatggggcccatggccacagagctggagcccctgtgcactccggtggtcacctgtactcccagctgcactgcttacacgtcttccttcgtcttcacctaccccgaggctgactccttccccagctgtgcagctgcccaccgcaagggcagcagcagcaatgagccttcctctgactcgctcagctcacccacgctgctggccctgtgagggggcagggaaggggaggcagccggcacccacaagtgccactgcccgagctggtgcattacagagaggagaaacacatcttccctagagggttcctgtagacctagggaggaccttatctgtgcgtgaaacacaccaggctgtgggcctcaaggacttgaaagcatccatgtgtggactcaagtccttacctcttccggagatgtagcaaaacgcatggagtgtgtattgttcccagtgacacttcagagagctggtagttagtagcatgttgagccaggcctgggtctgtgtctcttttctctttctccttagtcttctcatagcattaactaatctattgggttcattattggaattaacctggtgctggatattttcaaattgtatctagtgcagctgattttaacaataactactgtgttcctggcaatagtgtgttctgattagaaatgaccaatattatactaagaaaagatacgactttattttctggtagatagaaataaatagctatatccatgtactgtagtttttcttcaacatcaatgttcattgtaatgttactgatcatgcattgttgaggtggtctgaatgttctgacattaacagttttccatgaaaacgttttattgtgtttttaatttatttattaagatggattctcagatatttatatttttattttatttttttctaccttgaggtcttttgacatgtggaaagtgaatttgaatgaaaaatttaagcattgtttgcttattgttccaagacattgtcaataaaagcatttaagttgaatgcgaccaaccttgtgctcttttcattctggaagt

SEQ ID NO: 111 - DNA, 1541 bp, Homo sapiens
ttctcgtgtggagggcagctgttccgcctggcgtagatttatactcacaggataaggtaacggtttgtcaaacagtactgctacggaggagcagcagagaaagggagagggtttgagagggagcgaaaagaaaatggtaggcgcgcgtagttaattcaatgcggctctcttactctgtttacatcctagagctagagtgctcggctgcccggctgagtctcctccccaccttccccaccctccccaccctccccataagcgccctcccgggttcccaaagcagagggcgtgggggaaaagaaaaaagatcctctctcgctaactctccgcccaccggccctttataatgcgagggtctggacggctgaggacccccgagctgtgctgctcgcggccgccaccgccgggccccggccgtccctggctcccctcctgcctcgagaagggcagggcttctcagaggcttggcgggaaaaagaacggagggagggatcgcgctgagtataaaagccggttttcggggctttatctaactcgctgtagtaattccagcgagaggcagagggagcgagcgggcggccggctagggtggaagagccgggcgagcagagctgcgctgcgggcgtcctgggaagggagatccggagcgaatagggggcttcgcctctggcccagccctcccgctgatcccccagccagcggtccgcaacccttgccgcatccacgaaactttgcccatagcagcgggcgggcactttacgactggaacttacaacacccgagcaaggacgcgactctccgacgcggggaggctattctgcccatttggggacacttccccgccgctgccaggacaccgcttctctgaaaggctctccttgcagctgcttagacgctggatttttttcgggtagtggaaaaccaggtaagcaccgaagtccacttgccttttaatttatttttttatcactttaatgctgagatgagtcgaatgcctaatcttttctcccattcctgcgctattgacacttttctcagagtagttctaggtaactggggctggggtgggggtaatccagaactggatcggggtaaagtgcattgcaagatgggagaggagaaggcagagggaaacgggaatggtttttaagactaccctttcgagatttctgccttatgaatatattcacgctgactcccggccgggtcggacattcctgctttattgtgttaattgctctctgggttttgggggctgggggttgtttggcggtggcaagaaagcccttgcatcctgagctccttggagtacggaccgcattatcgcctgtgtgagccagatcgctccgcagccgctgacttgtccccgtctccgggagggcatttaaatttcggctcaccgcatttctgacagccggagacggacactgcggcgcgtcccgcccgcctgtccccgcggcgattccaacccgccctgatccttttaataaattccgatttggctttttaaaaagcaataatacaatttaaaacctgggtct

SEQ ID NO: 112 - DNA, 1941 bp, Homo sapiens
aagaccctcatcaatagatggagacatacagaaatagtcaaaccacatctaccaaatgccagtatcaggcggcggcttcgaagccaaagtgatgtttggatgtaaagtgaaatattagttggcggatgaagcagatagtgaggaaagttgagccaataatgacgtgaagtccgtggaagcctgtggctacaaaaaatgttgagccgtagatgccgtcggaaatggtgaagggagactcgaagtactctgaggcttgtaggagggtaaaatagagacccagtaaaattgtaataagcagtgcttgaattatttggtttcggttgttttctattagactatggtgagctcaggtgattgatactcctgatgcgagtaatacggatgtgtttaggagtgggacttctaggggatttagcggggtgatgcctgttgggggccagtgccctcctagttggggggtaggggctaggctggagtggtaaaaggctcagaaaaatcctgcgaagaaaaaaacttctgaggtaataaataggattatcccatatcgaaggcctttttggacaggtggtgtgtggtggccttggtatgtgctttctcgtgttacatcgcgccatcattggtatatggttagtgtgttggttagtaggcctagtatgaggagcgttatggagtggaagtgaaatcacatggctaggccggaggtcattaggagggctgagagggcccctgttaggggtcatgggctgggttttactatatgataggcatgtgatttcctgcgcctcgcaagactccagcgccttctctccgtcctcggattctctgctctcctcgacggagtcctccccgcaggcagccccgagcccctggtgctccatgaggagacaccgcccaccaccagcagcgactctgaggaggaacaagaagatgaggaagaaatcgatgttgtttctgtggaaaagaggcaggctcctggcaaaaggtcagagtctggatcaccttctgctggaggccacagcaaacctcctcacagcccactggtcctcaagaggtgccacgtctccacacatcagcacaactacgcagcgcctccctccactcggaaggactatcctgctgccaagagggtcaagttggacagtgtcagagtcctgagacagatcagcaacaaccgaaaatgcaccagccccaggtcctcggacaccgaggagaatgtcaagaggcgaacacacaacgtcttggagcgccagaggaggaacgagctaaaacggagcttttttgccctgcgtgaccagatcccggagttggaaaacaatgaaaaggcccccaaggtagttatccttaaaaaagccacagcatacatcctgtccgtccaagcagaggagcaaaagctcatttctgaagaggacttgttgcggaaacgacgagaacagttgaaacacaaacttgaacagctacggaactcttgtgcgtaaggaaaagtaaggaaaacgattccttctaacagaaatgtcctgagcaatcgcctatgaacttgtttcaaatgcatgatcaaatgcaacctcacaaccttggctgagtcttgagactgaaagatttagccataatgtaaactgcctcaaattggactttgggcataaaagaacttttttatgcttaccatcttttttttttctttaacagatttgtatttaagaattgtttttaaaaaattttaagatttacacaatgtttctctgtaaatattgccattaaatgtaaataactttaataaaacgtttatagcagttacacagaatttcaatcctagtatatagtacctagtattataggtactataaaccctaattttttttatttaagtacattttgctttttaaagttgatttttttctattgtttttagaaaaaataaaataactggcaaatatatcattgagc

SEQ ID NO: 113 - DNA, 2906 bp, Homo sapiens
tttttttttttgattgtagcgggcaaggggggcgtcgagaggcagcagcccatcgcccgcctctcaccccaccccctccagccagaggcgagaatcgcaggactcgggatcttcatcgggtggactagctgggatctccgcattggatttggggctgattaccactgcttggctattattattgttgttgttactactattatttttttttacccaagggagaaagacaaaaaaacggtgggatttatttaacatgatcttggcaaacgtcttctgcctcttcttctttctagacgagaccctccgctctttggccagcccttcctccctgcagggccccgagctccacggctggcgccccccagtggactgtgtccgggccaatgagctgtgtgccgccgaatccaactgcagctctcgctaccgcactctgcggcagtgcctggcaggccgcgaccgcaacaccatgctggccaacaaggagtgccaggcggccttggaggtcttgcaggagagcccgctgtacgactgccgctgcaagcggggcatgaagaaggagctgcagtgtctgcagatctactggagcatccacctggggctgaccgagggtgaggagttctacgaagcctccccctatgagccggtgacctcccgcctctcggacatcttcaggcttgcttcaatcttctcagggacaggggcagacccggtggtcagcgccaagagcaaccattgcctggatgctgccaaggcctgcaacctgaatgacaactgcaagaagctgcgctcctcctacatctccatctgcaaccgcgagatctcgcccaccgagcgctgcaaccgccgcaagtgccacaaggccctgcgccagttcttcgaccgggtgcccagcgagtacacctaccgcatgctcttctgctcctgccaagaccaggcgtgcgctgagcgccgccggcaaaccatcctgcccagctgctcctatgaggacaaggagaagcccaactgcctggacctgcgtggcgtgtgccggactgaccacctgtgtcggtcccggctggccgacttccatgccaattgtcgagcctcctaccagacggtcaccagctgccctgcggacaattaccaggcgtgtctgggctcttatgctggcatgattgggtttgacatgacacctaactatgtggactccagccccactggcatcgtggtgtccccctggtgcagctgtcgtggcagcgggaacatggaggaggagtgtgagaagttcctcagggacttcaccgagaacccatgcctccggaacgccatccaggcctttggcaacggcacggacgtgaacgtgtccccaaaaggcccctcgttccaggccacccaggcccctcgggtggagaagacgccttctttgccagatgacctcagtgacagtaccagcttggggaccagtgtcatcaccacctgcacgtctgtccaggagcaggggctgaaggccaacaactccaaagagttaagcatgtgcttcacagagctcacgacaaatatcatcccagggagtaacaaggtgatcaaacctaactcaggccccagcagagccagaccgtcggctgccttgaccgtgctgtctgtcctgatgctgaaactggccttgtaggctgtgggaaccgagtcagaatatttttgaaagctacgcagacaagaacagccgcctgacgaaatggaaacacacacagacacacacacaccttgcaaaaaaaaaattgtttttcccaccttgtcgctgaacctgtctcctcccaggtttcttctctggagaagtttttgtaaaccaaacagacaagcaggcaggcagcctgagagctggcccaggggtcccctggcaggggaaactctggtgccggggagggcacgaggctctagaaatgcccttcactttctcctggtgtttttctctctggacccttctgaagcagagaccggacaagagcctgcagcggaagggactctgggctgtgcctgaggctggctgggggcaggacaacacagctgcttccccaggctgcccactctggggacccgctgggggctggcagagggcatcggtcagcggggcagcggggctggccatgagggtccaccttcagccctttggcttcaaggatggagatggttttgccctccctctctgccctcgggtggggctggtgggtctgcagctggtgtgggaacttccccacggatggcggtggagggggttcgcaccgtgctgggctccccctgactgtagcacggagtgttggggctgggggccagctccaggagggcttgagagctcagcctgcctgggagagcccttgtggcgaggcattaaaacttgggcaccagcttctttctcggtggcagaaattttgaagtcagagagaaacggtcctttgttggcttctttgctttctcgtgggtcctttggcaggcctccctttggggagagggaggggagagaccacagccgggtgtgtgtctgcagcaccgtgggccctcaagctttcctgctgtcttctccctcctcctcctttcccctttctctttcctcatttcctagacgtacgtcaactgtatgtacataccggggctcctctcctaacatatatgtatatacacatccatatacatatattgtgtggtttcccctttctttcctttttttaagcaacaaaactatggaaataataccccaacagatgagcgaaaatgtattattgtaaagtttattttttttaatactgttgtctataatggggaaaaaggacattggccccgcagtgccctgccccagtcagcctggctgggctctggtgggggctcctgatccgcatccaagcttaaccaaggctccaataaacgtgctaggaagc

SEQ ID NO: 114 - DNA, 1707 bp, Homo sapiens
gcggccgcgtcgacgttgggtcggacctgaacccctaaaagcggaaccgcctcccgccctcgccatcccggagctgagtcgccggcggcggtggctgctgccagacccggagtttcctctttcactggatggagctgaactttgggcggccagaacagcacagctgtccggggatcgctgcacgctgagctccctcggcaagacccagcggcggctcgggattttttttgggggggcggggaccagccccgcgccggcaccatgttcctggcgaccctgtacttcgcgctgccgctcttggacttgctcctgtcggccgaagtgagcggcggagaccgcctggattgcgtgaaagccagtgatcagtgcctgaaggagcagagctgcagcaccaagtaccgcacgctaaggcagtgcgtggcgggcaaggagaccaacttcagcctggcatccggcctggaggccaaggatgagtgccgcagcgccatggaggccctgaagcagaagtcgctctacaactgccgctgcaagcggggtatgaagaaggagaagaactgcctgcgcatttactggagcatgtaccagagcctgcagggaaatgatctgctggaggattccccatatgaaccagttaacagcagattgtcagatatattccgggtggtcccattcatatcagtggagcacattcccaaagggaacaactgcctggatgcagcgaaggcctgcaacctcgacgacatttgcaagaagtacaggtcggcgtacatcaccccgtgcaccaccagcgtgtccaacgatgtctgcaaccgccgcaagtgccacaaggccctccggcagttctttgacaaggtcccggccaagcacagctacggaatgctcttctgctcctgccgggacatcgcctgcacagagcggaggcgacagaccatcgtgcctgtgtgctcctatgaagagagggagaagcccaactgtttgaatttgcaggactcctgcaagacgaattacatctgcagatctcgccttgcggatttttttaccaactgccagccagagtcaaggtctgtcagcagctgtctaaaggaaaactacgctgactgcctcctcgcctactcggggcttattggcacagtcatgacccccaactacatagactccagtagcctcagtgtggccccatggtgtgactgcagcaacagtgggaacgacctagaagagtgcttgaaatttttgaatttcttcaaggacaatacatgtcttaaaaatgcaattcaagcctttggcaatggctccgatgtgaccgtgtggcagccagccttcccagtacagaccaccactgccactaccaccactgccctccgggttaagaacaagcccctggggccagcagggtctgagaatgaaattcccactcatgttttgccaccgtgtgcaaatttacaggcacagaagctgaaatccaatgtgtcgggcaatacacacctctgtatttccaatggtaattatgaaaaagaaggtctcggtgcttccagccacataaccacaaaatcaatggctgctcctccaagctgtggtctgagcccactgctggtcctggtggtaaccgctctgtccaccctattatctttaacagaaacatcatagctgcattaaaaaaatacaatatggacatgaaaaaaaaaaaaaaaaaaaagtcgacgcggccgc

SEQ ID NO: 115 - DNA, 1797 bp, Homo sapiens
ccagcagggagctgggagctgggggaaacgacgccaggaaagctatcgcgccagagagggcgacgggggctcgggaagcctgacagggcttttgcgcacagctgccggctggctgctacccgcccgcgccagcccccgagaacgcgcgaccaggcacccagtccggtcaccgcagcggagagctcgccgctcgctgcagcgaggcccggagcggccccgcagggaccctccccagaccgcctgggccgcccggatgtgcactaaaatggaacagcccttctaccacgacgactcatacacagctacgggatacggccgggcccctggtggcctctctctacacgactacaaactcctgaaaccgagcctggcggtcaacctggccgacccctaccggagtctcaaagcgcctggggctcgcggacccggcccagagggcggcggtggcggcagctacttttctggtcagggctcggacaccggcgcgtctctcaagctcgcctcttcggagctggaacgcctgattgtccccaacagcaacggcgtgatcacgacgacgcctacacccccgggacagtacttttacccccgcgggggtggcagcggtggaggtgcagggggcgcagggggcggcgtcaccgaggagcaggagggcttcgccgacggctttgtcaaagccctggacgatctgcacaagatgaaccacgtgacaccccccaacgtgtccctgggcgctaccggggggcccccggctgggcccgggggcgtctacgccggcccggagccacctcccgtttacaccaacctcagcagctactccccagcctctgcgtcctcgggaggcgccggggctgccgtcgggaccgggagctcgtacccgacgaccaccatcagctacctcccacacgcgccgcccttcgccggtggccacccggcgcagctgggcttgggccgcggcgcctccaccttcaaggaggaaccgcagaccgtgccggaggcgcgcagccgggacgccacgccgccggtgtcccccatcaacatggaagaccaagagcgcatcaaagtggagcgcaagcggctgcggaaccggctggcggccaccaagtgccggaagcggaagctggagcgcatcgcgcgcctggaggacaaggtgaagacgctcaaggccgagaacgcggggctgtcgagtaccgccggcctcctccgggagcaggtggcccagctcaaacagaaggtcatgacccacgtcagcaacggctgtcagctgctgcttggggtcaagggacacgccttctgaacgtcccctgcccctttacggacaccccctcgcttggacggctgggcacacgcctcccactggggtccagggagcaggcggtgggcacccaccctgggacctaggggcgccgcaaaccacactggactccggccctcctaccctgcgcccagtccttccacctcgacgtttacaagcccccccttccacttttttttgtatgttttttttctgctggaaacagactcgattcatattgaatataatatatttgtgtatttaacagggaggggaagagggggcgatcgcggcggagctggccccgccgcctggtactcaagcccgcggggacattgggaaggggacccccgccccctgccctcccctctctgcaccgtactgtggaaaagaaacacgcacttagtctctaaagagtttattttaagacgtgtttgtgtttgtgtgtgtttgttctttttattgaatctatttaagtaaaaaaaaaattggttctttattaa

SEQ ID NO: 116 - DNA, 1292 bp, Homo sapiens
gaattcccaagagtctaggtaagagtttgttcccgtggtgcggagggtcaaggcccacacccggaaacctagcgaggtaaagttgcgtcttggttgtagagacgacaacttctccgcttcctcggcgatggcggcgtccgggagcggtatggcccagaaaacctgggaactggccaacaacatgcaggaagctcagagtatcgatgaaatctacaaatacgacaagaaacagcagcaagaaatcctggcggcgaagccctggactaaggatcaccattactttaagtactgcaaaatctcagcattggctctgctgaagatggtgatgcatgccagatcgggaggcaacttggaagtgatgggtctgatgctaggaaaggtggatggtgaaaccatgatcattatggacagttttgctttgcctgtggagggcactgaaacccgagtaaatgctcaggctgctgcatatgaatacatggctgcatacatagaaaatgcaaaacaggtgggccaccttgaaaatgcaatcgggtggtatcatagccaccctggctatggctgctggctttctgggattgatgttagtactcagatgctcaatcagcagttccaggaaccatttgtagcagtggtgattgatccaacaagaacaatatccgcagggaaagtgaatcttggcgcctttaggacatacccaaagggctacaaacctcctgatgaaggaccttctgagtaccagactattccacttaataaaatagaagattttggtgtacactgcaaacaatattatgccttagaagtctcatatttcaaatcctctttggatcgcaaattgcttgagctgttgtggaataaatactgggtgaatacgttgagttcttctagcttgcttactaatgcagactataccactggtcaggtctttgatttgtctgaaaagttagagcagtcagaagcccagctgggacgagggagtttcatgttgggtttagaaacgcatgaccgaaaatcagaagacaaacttgccaaagctacaagagacagctgtaaaactaccatagaagctatccatggattgatgtctcaggttattaaggataaactgtttaatcaaattaacatctcttaaacagtctctgagaagtactttacctgaaagacagtatgagaaaaatattcaagtacactttaaaaccagttacccaaaatctgattagaagtataaggtgctctgaagtgtcctaaatattaatatcctgtaataaagctctttaaaatgaaaaaaaaaa

SEQ ID NO: 117 - DNA, 1601 bp, Homo sapiens
aagggccccaaatttaaaatgcctgacctgcacctcaaggcaccgaagatctctatgcctgaagttgacctgaatctgaaaggtccaaagatgaagggcgacgtggacgtttctctgcccaaagtggaaggcgacctcaagggccctgaagttgacgtcaagggccccaaagtggacattgatgtcccagatgtggacgttcaaggcccagactggcacttaaaaatgcccaaagtgaaaatgcccaagttcagcatgcctggcttcaaaggagagggcccagatgtggatgtgaacctgcccaaggctgaccttgacgtctcaggacccaaggtggacattgatgttcctgatgtgaatatcgaaggtccagatgcgaaactaaagggccctaaattcaagatgcctgagatgaacatcaaagcccccaagatctccatgcctgactttgatttgcatctgaaaggtcccaaggtgaagggtgatgtggatgtttcccttcctaaagtggaaggtgacctcaagggcccagaagttgacatcaagggccccaaagtggacatcgatgcccctgatgtagatgttcatggcccagactggcacctgaagatgcccaaggtgaaaatgcccaaattcagcatgccaggattcaaaggagagggcccagatgtggatgttacccttcctaaggctgacattgagatttctggccccaaagtggacattgatgcccctgatgtcagtatcgaaggtccagatgcaaaactcaagggtccaaagttcaagatgccagagatgaacatcaaggcccccaaaatctccatgcctgacattgactttaacttgaagggtcccaaagtgaaaggtgatgtggatgtctctctgcccaaagtggaaggtgatctcaagggccctgaaattgacataaaaggccccagtttggacattgacacacctgatgtcaatattgaaggtccggaaggaaaattgaaggggcccaaatttaagatgcctgagatgaacatcaaagctcccaaaatctctatgcctgactttgatttgcacctgaaaggtcccaaggtgaagggtgatgtggatgtttcactacctaaggtggaaagtgatctgaaagggccagaggtagacattgaaggtcctgaagggaagctcaaaggtcccaagtttaagatgcctgatgtacatttcaaaagcccacaaatctccatgagtgacattgatttgaatttgaaaggacctaagataaaaggagatatggacatttccgttcctaaactggagggagatctgaaaggtcccaaagtggatgtcaaaggccctaaagtgggcattgacactcctgatattgacattcatggtccagaagggaaactgaagggccccaaatttaaaatgcctgacttacacctcaaggcaccgaagatctctatgcctgaagttgacctgaatctgaaaggtccaaaggtgaagggcgacatggacatttctctgcccaaagtggaaggcgacctcaagggccccgaagttgacatcagggaccccaaagtggacattgatgtcccagatgtggacgttcaaggccc

SEQ ID NO: 118 - DNA, 4051 bp, Homo sapiens
ttacccttcctaaagtggaaggtgacctcaagggcccagaagctgacatcaagggcccaaaagtggacatcaacacccctgatgtggatgttcatggcccagactggcacctgaagatgcccaaggtgaaaatgcccaaattcagcatgcctggcttcaaaggagaaggtccagatgtggatgtgaacctgcccaaggctgacattgatgtctcaggacccaaagtggacgttgatgttcctgatgtgaatatcgaaggtccagatgcgaaactaaagggccccaagttcaagatgcctgagatgagcatcaaagcccccaagatctccatgcctgatattgacttaaacctgaaaggacccaaagtgaagggtgatgtggatgttacccttcctaaagtggaaggtgacctcaagggcccagaagctgacatcaagggcccaaaagtggacatcaacacccctgatgtggatgttcatggcccagactggcacctgaagatgcccaaggtgaaaatgcccaaattcagcatgcctggcttcaaaggagaaggtccagatgtggatgtgagcctgcccaaggccgacatcgatgtctcgggacccaaggtggacgttgatattccagatgtgaatatcgaaggtccagacccaaaactgaaggtccccaaggtcaagatgcctgaaataaatatcaaagctcccaagatctccatacctgatgttgacctggatttgaaaggacccaaagtaaaaggagattttgatgtgtctgtccctaaggttgaagggactttgaaaggcccagaagtagatcttaaaggtccacgtctggatttcgaaggccctgatgccaaactcagtggcccatctttgaagatgccatcgctggagatatctgctcctaaagtaactgctcctgatgttgatttgcatctcaaggcaccaaaaattggattttcaggtccgaagttagaaggtggtgaagtggacctcaagggacccaaagttgaagctccaagcttagatgtacacatggacagcccagatattaacatcgaagggccagatgttaaaatccccaaatttaagaaacccaagtttggatttgggccaaaaagccccaaagctgacatcaagtcaccttcactggatgtcactgttcctgaggcagagctgaaccttgagactcctgaaattagtgttggtggcaagggcaagaaaagtaagtttaaaatgcctaaaattcatatgagtggtcctaagattaaggccaaaaaacagggatttgacctgaatgttcctgggggtgaaattgatgccagcctcaaggctccggatgtagatgtcaacatcgcagggccggatgctgcactcaaagtcgacgtgaaatcgcccaaaaccaagaaaacgatgtttggaaaaatgtacttcccagatgtagagtttgacattaaatcacctaaatttaaagctgaggcccctctccctagccccaaactggagggtgaactccaggcacctgatctggaactttctttgccagcgattcacgtcgaaggtcttgacatcaaggcgaaggctcccaaggtcaagatgccagatgtggacatctcagtgccaaaaatagagggtgacctgaaaggccccaaagtgcaggcaaacttgggtgcacctgacatcaacatcgaaggcctagatgctaaagtcaaaacaccgtccttcggcatttctgcccctcaagtctccatccctgatgtgaatgtaaacttgaaaggaccaaagataaagggtgatgtccccagcgtgggactggaaggaccagatgtagatctgcaaggtccagaagcaaaaattaagttccccaagttttccatgcccaagatcggcatcccaggtgtgaaaatggagggtgggggagccgaggtccatgcccagctaccctctcttgaaggagacttgagaggaccagatgttaagctcgaagggcccgatgtttctctaaaggggccaggagtagacttaccttcagtgaacctctctatgccaaaagtctctgggcctgaccttgatctgaacttgaaaggaccaagtttgaagggagacctggatgcatctgttcccagcatgaaggtgcatgctccagggctcaacctcagtggtgtcggtggcaaaatgcaggtgggaggagacggtgtgaaagtgccagggatcgatgccacaacaaagcttaacgttggggcaccagatgtgacactgaggggaccaagcctgcagggagatctggctgtctctggtgacatcaaatgccctaaagtatccgtaggagctcctgatctaagcttggaggcatccgaaggcagcattaaacttcccaaaatgaagctgccccaatttggtatctctactccggggtccgacttgcacgtcaatgccaaggggccacaggtttctggcgaactgaaggggccaggtgtggatgtgaacctgaaagggtctcggatttcagcaccgaatgtggactttaacttggaaggaccaaaagtgaaagggagccttggggccactggtgagatcaaaggccccactgtcggaggaggtcttccaggcattggtgttcaaggcctagaaggaaacctccagatgcctggaattaagtcctctggatgtgatgtgaacctgccaggcgtgaatgtgaaactcccaactgggcagatttctgggcctgaaatcaaaggtggtctgaaaggttcagaagtaggtttccatggggctgctcctgatatcagtgtgaaggggcctgcctttaatatggcatctcctgagtcagattttggcatcaacttgaagggcccaaaaatcaaaggaggtgcggatgtttcagggggtgtcagtgccccagacatcagccttggtgaagggcatttgagtgttaaaggttccgggggtgagtggaagggaccccaagtctcctctgctctcaacttggacacatctaagtttgctgggggccttcatttctcaggaccaaaggtggaaggaggtgtgaaaggaggtcagattggactccaggctcctgggctgagtgtgtctgggcctcaaggtcacttggaaagtggatctggaaaagtaacattccctaaaatgaagatccccaaatttaccttctctggccgtgagctggttggcagagaaatgggggtggatgttcacttccctaaagcagaggccagcatccaagctggtgctggagacggcgagtgggaagagtctgaagtcaaactgaaaaagtccaagatcaaaatgcccaagtttaatttttccaaacctaaagggaaaggtggtgtcactggctcaccagaagcatcaatttctgggtccaaaggtgacctgaaaagttcaaaggccagcctgggctctctggaaggagaggcagaggccgaagcctcttcaccgaaaggcaaattctccttatttaaaagtaagaagccacggcaccgctcaaattcattcagtgatgaaagagagttctctggaccttccaccccgacggggacgctggagtttgaaggtggggaagtgtctctggaaggtgggaaagttaaagggaaacacgggaagctgaaattcggtacctttggtggattggggtcaaagagcaaaggtcattatgaggtgactgggagcgatgatgagacaggcaagttacaggggagtggggtgtccctggcctctaagaagtcccgactgtcctcctcttctagcaatgacagtgggaataaggttggcatccagcttcccgaggtggagctgtcagtttccacaaagaaagagtagcaggcctttgtatgtgtgtacatatatatatatataacaaaacatcagccttgggtggtgtgttcctatataaactccaaagggaaacacaccgactgcctcagcaatcatgcaaagaccttgcctggcccggtggcaagcgctgaaaaaccgaccgcctgtaggctcctggaactatacagataggtaaagagttccaagttcgtccggaattc

SEQ ID NO: 119 - DNA, 1443 bp, Homo sapiens
gtggctgcagcagcagcggcggcggaaaccctaaagtccgagtccggactacgagtgcgtggcctcctaatccggatcctagtcctgagcgtgtctgtgtgcgagtggacggtcccggacgcgatgaccctgaacggcggcggcagcggagcgggcgggagccgcggtgggggccaggagcgcgagcgccgtcggggcagcacaccctggggccccgccccgccgctgcaccgccgcagcatgccggtggacgagcgcgacctgcaggcggcgctgaccccgggtgccctgacggcggccgcggccgggacggggacccagggtcccaggctggactggcccgaggactccgaggactcgctcagctcagggggcagcgactcagacgagagcgtttacaaggtgctgctgctgggggcgcccggcgtgggcaagagcgccctggcgcgcatcttcggcggtgtggaggacgggcctgaagcagaggcagcagggcacacctatgatcgctccattgtagtggacggagaagaggcatcactcatggtctacgacatttgggagcaggacgggggccgctggttgcccggccactgcatggccatgggggatgcctatgtcattgtgtactcagtgacggacaagggcagcttcgagaaggcctcagaactgcgggtccagctgcggcgtgcacggcaaacagatgatgtgcccatcatcctcgtgggcaacaagagcgacctggtgcgctctcgtgaggtctcggtggatgagggccgggcctgcgcggtggtctttgactgcaagttcattgagacatcagcggcattgcaccacaatgtccaggcgctgtttgaaggtgtcgtgcgccagatacgcctgcgcagggacagcaaagaagccaacgcacgacggcaagcaggcacccggaggcgagagagccttggcaaaaaggcgaagcgcttcttgggccgcatcgtagctcgtaacagccgcaagatggcctttcgcgccaaatccaagtcctgccacgacctctcggttctctaggtcccacccgctcccactatggtgggagacgaacggaagggttggtgggctggcccagccaactgccccgggtgcctcagagcaggctcagactctgggtccctcggagctgccagccgggcacccccaacctcatggtcatggacagatagacagtgctgccctgcgaagtggctctcaggggccagtgagggctgggcccacagagatgcatgcgcaggctcatatgcgtcccaagcagccgcagcgcagccgccgggcaggcctgcgtgccgggagaggactctgccttttttcacagcccgggtgtgcctgccctggagggaggctcttcagtgcggtagctacttgtttacatgcagatttttgtaataaaggctatttcctgataaa

SEQ ID NO: 120 - DNA, 309 bp, Homo sapiens
tcatatttgtgggttttcattttaaattttctttctctaggtgaagctgtacttcacaaaaacagtagaggagccgtcaaatccagaggctagcagttcaacttctgtaacaccagatgttagtgacaatgaacctgatcattatagatattctgacaccactgactctgatccagagaatgaaccttttgatgaagatcagcatacacaaattacaaaagtctgaatttttttttatcaagagggataaaacaccatgaaaataaacttgaataaactgaaaaaaaaaaaaaaaaaaagtgcggccgc

SEQ ID NO: 121 - DNA, 1213 bp, Homo sapiens
atgacagccatcatcaaagagatcgttagcagaaacaaaaggagatatcaagaggatggattcgacttagacttgacctatatttatccaaacattattgctatgggatttcctgcagaaagacttgaaggcgtatacaggaacaatattgatgatgtagtaaggtttttggattcaaagcataaaaaccattacaagatatacaatctttgtgctgaaagacattatgacaccgccaaatttaattgcagagttgcacaatatccttttgaagaccataacccaccacagctagaacttatcaaacccttttgtgaagatcttgaccaatggctaagtgaagatgacaatcatgttgcagcaattcactgtaaagctggaaagggacgaactggtgtaatgatatgtgcatatttattacatcggggcaaatttttaaaggcacaagaggccctagatttctatggggaagtaaggaccagagacaaaaagggagtaactattcccagtcagaggcgctatgtgtattattatagctacctgttaaagaatcatctggattatagaccagtggcactgttgtttcacaagatgatgtttgaaactattccaatgttcagtggcggaacttgcagatcctcagtttgtggtctgccagctaaaggtgaagatatattcctccaattcaggacccacacgacgggaagacaagttcatgtactttgagttccctcagccgttacctgtgtgtggtgatatcaaagtagagttcttccacaaacagaacaagatgctaaaaaaggacaaaatgtttcacttttgggtaaatacattcttcataccaggaccagaggaaacctcagaaaaagtagaaaatggaagtctatgtgatcaagaaatcgatagcatttgcagtatagagcgtgcagataatgacaaggaatatctagtacttactttaacaaaaaatgatcttgacaaagcaaataaagacaaagccaaccgatacttttctccaaattttaaggtgaagctgtacttcacaaaaacagtagaggagccgtcaaatccagaggctagcagttcaacttctgtaacaccagatgttagtgacaatgaacctgatcattatagatattctgacaccactgactctgatccagagaatgaaccttttgatgaagatcagcatacacaaattacaaaagtctga

SEQ ID NO: 122 - DNA, 540 bp, Homo sapiens
cgagttccccgaggtgtacgtgcccaccgtcttcgagaactatgtggccgacattgaggtggacggcaagcaggtggagctggcgctgtgggacacggcgggccaggaggactacgaccgcctgcggccgctctcctacccggacaccgacgtcattctcatgtgcttctcggtggacagcccggactcgctggagaacatccccgagaagtgggtccccgaggtgaagcacttctgtcccaatgtgcccatcatcctggtggccaacaaaaaagacctgcgcagcgacgagcatgtccgcacagagctggcccgcatgaagcaggaacccgtgcgcacggatgacggccgcgccatggccgtgcgcatccaagcctacgactacctcgagtgctctgccaagaccaaggaaggcgtgcgcgaggtcttcgagacggccacgcgcgccgcgctgcagaagcgctacggctcccagaacggctgcatcaactgctgcaaggtgctatgagggccgcgcccgtcgcgcctgcccctgccggc

SEQ ID NO: 123 - DNA, 2384 bp, Homo sapiens
atctgccaccgcagtctggttggagctgttgtcttgtatgctcagcgaggcccggagagacccgggagagagctaggccgagtccaccgcccgagtctgctgcccgagcccgcgttacgcacaaagccgccgatccccggcctggggtgagcagagcgaccaccgcccgggagcagcgcggcgagacgcacggtgcgccctatgcccccgcgcccccaccgcccccgccgcggcagccgaagcgcagcgagagaacgcgccaccgcggggcccgggtgcagctagcgaccctctcgccacctgcgcgcagcccgaggtgagcagtgagcggcgagcgggagggcagcgaggcgttcgcgggccccctcctgctgcccgggcccggcccgctcatggcggccatccgcaagaagctggtggtggtgggcgacggcgcgtgtggcaagacgtgcctgctgatcgtgttcagtaaggacgagttccccgaggtgtacgtgcccaccgtcttcgagaactatgtggccgacattgaggtggacggcaagcaggtggagctggcgctgtgggacacggcgggccaggaggactacgaccgcctgcggccgctctcctacccggacaccgacgtcattctcatgtgcttctcggtggacagcccggactcgctggagaacatccccgagaagtgggtccccgaggtgaagcacttctgtcccaatgtgcccatcatcctggtggccaacaaaaaagacctgcgcagcgacgagcatgtccgcacagagctggcccgcatgaagcaggaacccgtgcgcacggatgacggccgcgccatggccgtgcgcatccaagcctacgactacctcgagtgctctgccaagaccaaggaaggcgtgcgcgaggtcttcgagacggccacgcgcgccgcgctgcagaagcgctacggctcccagaacggctgcatcaactgctgcaaggtgctatgagggccgcgcccgtcgcgcctgcccctgccggcacggctccccctcctggaccagtcccccgcgagcccggagaaggggagacccgtgtcccacaaggaccccaccggcctgcctggcatctgtctgctgacgcctctggcttgcgccaggacttggcgtgggcaccgggcgcccccatcccagtgtctgtgtgcgtccagctgtgttgcacaggcctgggctccccactgagtgccaagggtcccctgagcatgcttttctgaagagccgggcctcagagtgtgtggctgtgtgtctgttcgactcccctcgccccattttcaccccacccccgcctctgatccccgggggcgagattggcgcgggagtgtggccgcgccccatcagatgttctcccttcaccagcgggagcttgatatcccttgtctgtaacatagaccccgggtactgcgggaggggagggctgctggggaggatggggggatgttatataaatatagatataattttattttcggagctaagatggtgttatttaagggtggtgatgggtgagcgctctggcccaggctgggccagactcccgcccaagcatgaacaggacttgaccatctttccaacccctggggaagacatttgcaactgacttggggaggacacagcttcagcacagcctctcctgcgggccagcccgctgcgaaccctccaccagctaccggagggaggagggaggatgcgctgtggggttgtttttgccataagcgaactttgtgcctgtcctagaagtgaaaattgttcagtccaagaaactgatgttatttgatttatttaaaggctaaaatttgtttttttattctttgcacaattgtttcattgtttgacacttaatgcactcgtcatttgcatacgacagtagcattctgaccacacttgtacgctgtaacctcatctacttctgatgtttttaaaaaatgacttttaacaaggagagggaaaagaaacccactaaattttgctttgtttccttgaagaatgtggcaacactgttttgtgattttatttgtgcaggtcatgcacacagttttgataaagggcagtaacaagtattggggcctattttttttttttccacaaggcattctctaaagctatgtgaaattttctctgcacctctgtacagagaatacacctgcccctgtatatccttttttcccctcccctccctcccagtggtacttctactaaattgttgtcttgttttttattttttaaataaactgacaaatgacaaaatggtgagcttatgatgtttacataaaagttctataagctgtgtatacagttttttatgtaaaatattaaaagactatgatgatgacatttaaaaaaaaaaaaaaaaaa

SEQ ID NO: 124 - DNA, 4426 bp, Homo sapiens
ctgcaggtctgtgtggctgctggagaggctgggctcctttcctcaccccgaggctgcctaatatgctttctggatcctggagaaaactgacccactattctcatactggtgcaacttcttccaagacctcaaaactggacaacgtgaacttgtcttgtttcttgtctcttcttgctagggctgtcattgggacagtctgagatggggagtcggggggagacaatggatgaatggatggatgaatgacagcagtccagggagatgtccctgtgtgtcctgaactgggcccttcctccagtgagaagccttcctgagtgagtttatatagtcatcccttggtatccatggaggattagttctagggtccccggggatgccaaaatccatggatgctcaagtcgctgacataacatgacctagtatttacatataactatgcacattctcccgtatacattagaccatctctagattattcattatgtgtaatacaatgcagatgctatataaatggttgtgatactgtatttagggaatgatgacaagaacaacgtctgcacatgttcagtagagacaaccatccgatttgttttctgaatattttccatctgctgttggctgaatccacagttgcagagctcccagatacgagggccaagtgctttgagagtagggtgggtgaggttgctaatgagtacaggggagcaggtgttgatcagggggaccctgcactgggcatctggacgccctgtctcaggacttgagactccgtttggatggcacaggcagactaacccaggtcaaagccctccccttggatgttcattttatcccaagctcttctggaccctggaatttggcatcccctaggccctgggtgggacagctgagccaggtttagataacatgtctagagtgggcccctactgtgtgcctggcatttccgcacatgatcctctagctagaatatccaagggtcatggagagaaatacccagttaaaatatcagaaatgaaaaagtgataccattagagacactaaaaagacgattagagatactaaaaataccattaagtaatagtattagcttttgtattctgagattcaacagcagcagtcacttccctccactcctatgtgtatcccaggaccaccctgggcggggagggctgaggtcagggaggtctgaagctggtcctgggctccgggggtgacagtgatgaggaactgggtgcacacatgagtggggcagccgggcctggccagagaagcaacacacacgtgcacagacatgtttatccacatacacatgtgcacgcatgtgcacaaacacattgcaggcaggcatgttgacgcctcaggcagcggaggaccctgactctgggccctgctgacccgggcaaggcccattgtgatgcgtgccatgacctcagaatgtcactggtgcttagcacctatccgctctccagactgcgtctgtgttctacggcagttacacacacgcagtggtattcacaagcggttttgtggactcaaaggttttctccctgagaggcataacccaggccagctgattcatcagaatcaggtgagtgtgacctgctctcttccctccaggctgacttggggacagtggctatggtatgggcggtgttggcctctgggcagctacagaggagggtcatccctgagcactcaccgggcgcccgttctacactgcccatgtagacgattttctctttcgtcttcatggtggcttcgtagagtgggtgctgttcccaaatgtacccattcgacaggtgagccgtctggggtcagagaggcagtaactggcctgggaatccagacaagaccctgggttttgctctcagccctgctgtgtgccatgctagacttcaggcctcaaccctgagacctccctgctctagatcccaaatctgcccagatttccgatccaatgggcagagcctggccctggcagagacactgggatggatccactgtgggtggggaggagggaagggtcctcagaacacacctggggcctaagctgggtcttgatggtcactgtgggacccactggacacacacagtcccttgtctgggagtggcatggggagccttctgcccttgggcagttgtggaaagtgaaggagccctggagagctggctgaggggagactatcttcccttgtgttcaaaggggtccaggcactggggctctccccaagtatttcttattctgtctggcctcgctttccttttgccctgagtattctcaggagggacggtccatctagatgtcctccaggagcaaggacccactgttcttcatcagtgacccaggaaaatgaagccccctcctgtggggacagctcagaatggtggagtccacagtccctccctgagagacatggtttccatgagcacagtggctgctttggagacagtaatcattttcatccccaaaaccaaacacactcctgctcaaatggtgttattgctaaagcagcttcactggttagactgaagggccatggtagcccaagtgatgagcggggtagaatggagcagtcaggagagatcttgttccccgtaggaaactgggcatctctgtggccctgaacatcccaggaggccgatcgtacagagacctctggtgcctgaccgcagttcacatccacatccctggaatagaccatcacaggctcttcacccttggcaggtggacaccattcaacctgccggggcaggtgtgtgccatttcatggcatatggggacaaccggattctctgtccaggtcccactcttctcgagtccttgggaagatgcccacccctgcttggggcttcagactgcagagacccatggaggtgtgggccatggggtttggccctttttaccggagtgcagtggtggaatgaaggttatacaaccagccagcatctgggagcccggtgggagcggttcaggtgttctccgaagctgtcgggtacagtgtaacctttagacaattttgtctcacaggatggacatggtagagaatgcagatagtttgcaggcacaggagcggaaggacatacttatgaagtatgacaaggtacagttcggtctgctccttggagggaggcctcttccagtgcgccctggtcaaagggtcctgggttccctaggagcacagggcagggacgggtggccaatacccccaggcccttgcaccctttaccttggacccctcaccaaggctcctctgggttacagggacaccgagctgggctgccagaggacaaggggcctgagcccgttggaatcaacagcagcattgatcgttttggcattttgcagtgagtcatcctctatgctcccctcacccctaaagcagctgtctcagctcagggatgggtttgcttttagaaaggcctttctgatgcaggacatgtctcgctaggtcgggccaacctcttttccagggtcagaactcctccctggctcccctgcaggtccagcccgaggttgttgttaggccagaggtggaaggcccaactagggagctggtgggaatggagactgggctaggcaggcccctgggctctcagcagttctgtcggcaagtgagcacaagaggagcgggcagcctgaggttctggtcctgtctaccaggagacaaccccagtgagatccaagggttgtggccacagggtgaggagacacctggcccagtctcagggctgttgtccagcaggtctctcagagcccaccggcccctgtcctcctccatttccctagagctacagccctcactgtccccatggggaagggggaaaggtgtggagacagtgggggctttggcccgaagagaatgggggagaagatgggcagggccccgctctgggcatctcacagtgagactagggaggcagcagggcttgtgactaaagaccctgggtctggtgctgggaagggatctggggccaggtaagaggagcccagcctggagcccaacctcagggatcataggatggagagacagcggatgccgggcaagataaggtgggagggagcttatgaggcgtgccacttctgaaacacagggtgtgtggctcgggtatagggagaggcaggtggatgcttggccagcctcaggactgttgtccagcagggtctctgagggcccacctgcccctgttctcccccatgtccttatatctacagccctcagtgtccccatggggaagggggaaaggcatggggacagtgggagttgtggccctaggggaatgggggagaagatgggcaggccattctggcctctcacggtgaggccagggaggcagcagggcttgtgactaaagaccctgggtctggtgctgggaagggatctggggccaggtaagaggagcccagccaggagcccatcctcaggga

SEQ ID NO: 125 - DNA, 2021 bp, Homo sapiens
ggggcgggcgaggcgcgtgccggccgcaggagctccgggttgccgccgccgccgccgcccgcagcccacgtgcggccgctgctgcacccgagctcacgccccgcggccgctttgttgctcccggccggcctgcacgatgcacacgccggacttcgcaggcccagacgacgcgcgcgcagttgacatcatggacatatgtgagtccatcctggagaggaagcggcatgacagcgaaaggtctacttgcagcatcttggagcagacagacatggaagctgtcgaggctcttgtttgtatgagctcctggggtcaaagatcccagaaaggtgacctgttgcggataagacccctcacgcctgtctctgactctggggatgtcaccaccactgtgcatatggatgcagccacacctgaactaccaaaagacttccattctttatcgactctgtgcataactcctcctcagagccctgatctcgtggagccatcgacaaggacacctgtttctccccaagtaacagattccaaagcatgtacagccacggatgttctccagtcctctgccgtagtggccagagctctgagcgggggcgcggagaggggcttgctgggtttggagccagtgcccagctctccctgcagggccaaggggactagcgtgatccgacacactggggagagccctgctgcctgctttcccaccatccagactccagattgccggctttctgacagcagagaaggagaagagcagcttctgggacactttgaaactttgcaggacacacacctcacggacagtttactcagcactaacttggtgtcctgtcagccctgcttgcacaagtctggtggcctgctgctcactgacaaaggccagcaggcagggtggcctggtgcagttcagacttgctcaccaaagaattatgaaaatgacctgcccaggaaaaccacccctctgatttctgtctctgtccctgctccccctgtcctttgccagatgatccctgtgactggacaaagtagcatgttaccagcttttttgaagccccctccccagttgtctgtggggactgtgagacccatcctagctcaggctgctccagcgcctcaacctgtgttcgtgggacctgctgtgcctcagggagctgtgatgttggtcctgccccagggagccctccctccgcctgccccctgtgcagccaatgtcatggctgccgggaataccaagttgttgccccttgcccctgctccagtgttcatcacctctagccaaaactgtgtccctcaggtagacttttcccgaaggaggaactatgtttgcagcttcccaggttgccggaagacctacttcaaaagttcccaccttaaggcccatcttcgcactcacacaggggagaagcctttcaactgcagctgggatggctgtgataaaaagtttgctcgttcggatgagctgtcacgccaccgcagaactcacacaggggagaagaagtttgtgtgcccggtgtgtgaccgacgtttcatgcgcagtgaccacctgacgaagcatgcccggcgccacatgacgaccaagaagatcccaggctggcaggcagaggttggcaagctgaacagaatcgcctctgcagagagcccggggagcccactggtgagcatgccagcctctgcctgaaaggtccattaggacatcactcatgggatttttaaaaagcctctttccaggaatggaactgatggattcctctcccactgcctcacccaaaaaaaacggtcttggcggcctaggggaagatcggggagctggttttgatgaaagtatgttaacttttcttttccacttgggaccccgttcaggaccttttgcagtttcagaagtttttttgttttggtttttttttttttaaagaaatggtagaaaatttgataatctgaatcaccagcattcaaacaaatatttcggcaataaagtttacaaaatctggatttttaaaaaaaaaaaaaaaaaaaaaaaaaaaaaa

SEQ ID NO: 126 - DNA, 954 bp, Homo sapiens
agccgtgtaccccgcagagccgccagccccgggcatgttccgagacttcggggaacccggcccgagctccgggaacggcggcgggtacggcggccccgcgcagcccccggccgcagcgcaggcagcccagcagaagttccacctggtgccaagcatcaacaccatgagtggcagtcaggagctgcagtggatggtacagcctcatttcctggggcccagcagttaccccaggcctctgacctaccctcagtacagccccccacaaccccggccaggagtcatccgggccctggggccgcctccaggggtacgtcgaaggccttgtgaacagatcagcccggaggaagaggagcgccgccgagtaaggcgcgagcggaacaagctggctgcggccaagtgcaggaaccggaggaaggaactgaccgacttcctgcaggcggagactgacaaactggaagatgagaaatctgggctgcagcgagagattgaggagctgcagaagcagaaggagcgcctagagctggtgctggaagcccaccgacccatctgcaaaatcccggaaggagccaaggagggggacacaggcagtaccagtggcaccagcagcccaccagccccctgccgccctgtaccttgtatctccctttccccagggcctgtgcttgaacctgaggcactgcacacccccacactcatgaccacaccctccctaactcctttcacccccagcctggtcttcacctaccccagcactcctgagccttgtgcctcagctcatcgcaagagtagcagcagcagcggagacccatcctctgacccccttggctctccaaccctcctcgctttgtgaggcgcctgagccctactccctgcagatgccaccctagccaatgtctcctccccttcccccaccggtccagctggcctggacagtatcccacatccaactccagc

SEQ ID NO: 127 - DNA, 1007 bp, Homo sapiens
atcatgtaccaggattatcccgggaactttgacacctcgtcccggggcagcagcggctctcctgcgcacgccgagtcctactccagcggcggcggcggccagcagaaattccgggtagatatgcctggctcaggcagtgcattcatccccaccatcaacgccatcacgaccagccaggacctgcagtggatggtgcagcccacagtgatcacctccatgtccaacccataccctcgctcgcacccctacagccccctgccgggcctggcctctgtccctggacacatggccctcccaagacctggcgtgatcaagaccattggcaccaccgtgggccgcaggaggagagatgagcagctgtctcctgaagaggaggagaagcgtcgcatccggcgggagaggaacaagctggctgcagccaagtgccggaaccgacgccgggagctgacagagaagctgcaggcggagacagaggagctggaggaggagaagtcaggcctgcagaaggagattgctgagctgcagaaggagaaggagaagctggagttcatgttggtggctcacggcccagtgtgcaagattagccccgaggagcgccgatcgcccccagcccctgggctgcagcccatgcgcagtgggggtggctcggtgggcgctgtagtggtgaaacaggagcccctggaagaggacagcccctcgtcctcgtcggcggggctggacaaggcccagcgctctgtcatcaagcccatcagcattgctgggggcttctacggtgaggagcccctgcacacccccatcgtggtgacctccacacctgctgtcactccgggcacctcgaacctcgtcttcacctatcctagcgtcctggagcaggagtcacccgcatctccctccgaatcctgctccaaggctcaccgcagaagcagtagcagcggggaccaatcatcagactccttgaactcccccactctgctggctctgtaacccagtgcacctccctccggagc

SEQ ID NO: 128 - DNA, 790 bp, Homo sapiens
actgccccaaggcccccgccgccgctccagcgccgcgcagccaccgccgccgccgccgcctctccttagtcgccgccatgacgaccgcgtccacctcgcaggtgcgccagaactaccaccaggactcagaggccgccatcaaccgccagatcaacctggagctctacgcctcctacgtttacctgtccatgtcttactactttgaccgcgatgatgtggctttgaagaactttgccaaatactttcttcaccaatctcatgaggagagggaacatgctgagaaactgatgaagctgcagaaccaacgaggtggccgaatcttccttcaggatatcaagaaaccagactgtgatgactgggagagcgggctgaatgcaatggagtgtgcattacatttggaaaaaaatgtgaatcagtcactactggaactgcacaaactggccactgacaaaaatgacccccatttgtgtgacttcattgagacacattacctgaatgagcaggtgaaagccatcaaagaattgggtgaccacgtgaccaacttgcgcaagatgggagcgcccgaatctggcttggcggaatatctctttgacaagcacaccctgggagacagtgataatgaaagctaagcctcgggctaatttccccatagccgtggggtgacttccctggtcaccaaggcagtgcatgcatgttggggtttcctttaccttttctataagttgtaccaaaacatccacttaagttctttgatttgtaccattccttcaaataaagaaatttggtaccc

SEQ ID NO: 129 - DNA, 878 bp, Homo sapiens
gtcccgcgggtctgtctcttgcttcaacagtgtttggacggaacagatccggggactctcttccagcctccgaccgccctccgatttcctctccgcttgcaacctccgggaccatcttctcggccatctcctgcttctgggacctgccagcaccgtttttgtggttagctccttcttgccaaccaaccatgagctcccagattcgtcagaattattccaccgacgtggaggcagccgtcaacagcctggtcaatttgtacctgcaggcctcctacacctacctctctctgggcttctatttcgaccgcgatgatgtggctctggaaggcgtgagccacttcttccgcgaattggccgaggagaagcgcgagggctacgagcgtctcctgaagatgcaaaaccagcgtggcggccgcgctctcttccaggacatcaagaagccagctgaagatgagtggggtaaaaccccagacgccatgaaagctgccatggccctggagaaaaagctgaaccaggcccttttggatcttcatgccctgggttctgcccgcacggacccccatctctgtgacttcctggagactcacttcctagatgaggaagtgaagcttatcaagaagatgggtgaccacctgaccaacctccacaggctgggtggcccggaggctgggctgggcgagtatctcttcgaaaggctcactctcaagcacgactaagagccttctgagcccagcgacttctgaagggccccttgcaaagtaatagggcttctgcctaagcctctccctccagccaataggcagctttcttaactatcctaacaagccttggaccaaatggaaataaagctttttgatgcaaaaaaaaaaaaaaaaaaa

SEQ ID NO: 130 - DNA, 2791 bp, Homo sapiens
gaaccatcattaattgaagtgagatttttctggcctgagacttgcagggaggcaagaagacactctggacaccactatggacagcctcttgatgaaccggaggaagtttctttaccaattcaaaaatgtccgctgggctaagggtcggcgtgagacctacctgtgctacgtagtgaagaggcgtgacagtgctacatccttttcactggactttggttatcttcgcaataagaacggctgccacgtggaattgctcttcctccgctacatctcggactgggacctagaccctggccgctgctaccgcgtcacctggttcacctcctggagcccctgctacgactgtgcccgacatgtggccgactttctgcgagggaaccccaacctcagtctgaggatcttcaccgcgcgcctctacttctgtgaggaccgcaaggctgagcccgaggggctgcggcggctgcaccgcgccggggtgcaaatagccatcatgaccttcaaagattatttttactgctggaatacttttgtagaaaaccatgaaagaactttcaaagcctgggaagggctgcatgaaaattcagttcgtctctccagacagcttcggcgcatccttttgcccctgtatgaggttgatgacttacgagacgcatttcgtactttgggactttgatagcaacttccaggaatgtcacacacgatgaaatatctctgctgaagacagtggataaaaaacagtccttcaagtcttctctgtttttattcttcaactctcactttcttagagtttacagaaaaaatatttatatacgactctttaaaaagatctatgtcttgaaaatagagaaggaacacaggtctggccagggacgtgctgcaattggtgcagttttgaatgcaacattgtcccctactgggaataacagaactgcaggacctgggagcatcctaaagtgtcaacgtttttctatgacttttaggtaggatgagagcagaaggtagatcctaaaaagcatggtgagaggatcaaatgtttttatatcaacatcctttattatttgattcatttgagttaacagtggtgttagtgatagatttttctattcttttcccttgacgtttactttcaagtaacacaaactcttccatcaggccatgatctataggacctcctaatgagagtatctgggtgattgtgaccccaaaccatctctccaaagcattaatatccaatcatgcgctgtatgttttaatcagcagaagcatgtttttatgtttgtacaaaagaagattgttatgggtggggatggaggtatagaccatgcatggtcaccttcaagctactttaataaaggatcttaaaatgggcaggaggactgtgaacaagacaccctaataatgggttgatgtctgaagtagcaaatcttctggaaacgcaaactcttttaaggaagtccctaatttagaaacacccacaaacttcacatatcataattagcaaacaattggaaggaagttgcttgaatgttggggagaggaaaatctattggctctcgtgggtctcttcatctcagaaatgccaatcaggtcaaggtttgctacattttgtatgtgtgtgatgcttctcccaaaggtatattaactatataagagagttgtgacaaaacagaatgataaagctgcgaaccgtggcacacgctcatagttctagctgcttgggaggttgaggagggaggatggcttgaacacaggtgttcaaggccagcctgggcaacataacaagatcctgtctctcaaaaaaaaaaaaaaaaaaaagaaagagagagggccgggcgtggtggctcacgcctgtaatcccagcactttgggaggccgagccgggcggatcacctgtggtcaggagtttgagaccagcctggccaacatggcaaaaccccgtctgtactcaaaatgcaaaaattagccaggcgtggtagcaggcacctgtaatcccagctacttgggaggctgaggcaggagaatcgcttgaacccaggaggtggaggttgcagtaagctgagatcgtgccgttgcactccagcctgggcgacaagagcaagactctgtctcagaaaaaaaaaaaaaaaagagagagagagagaaagagaacaatatttgggagagaaggatggggaagcattgcaaggaaattgtgctttatccaacaaaatgtaaggagccaataagggatccctatttgtctcttttggtgtctatttgtccctaacaactgtctttgacagtgagaaaaatattcagaataaccatatccctgtgccgttattacctagcaacccttgcaatgaagatgagcagatccacaggaaaacttgaatgcacaactgtcttattttaatcttattgtacataagtttgtaaaagagttaaaaattgttacttcatgtattcatttatattttatattattttgcgtctaatgattttttattaacatgatttccttttctgatatattgaaatggagtctcaaagcttcataaatttataactttagaaatgattctaataacaacgtatgtaattgtaacattgcagtaatggtgctacgaagccatttctcttgatttttagtaaacttttatgacagcaaatttgcttctggctcactttcaatcagttaaataaatgataaataattttggaagctgtgaagataaaataccaaataaaataatataaaagtgatttatatgaagttaaaataaaaaatcagtatgatggaataaacttg

SEQ ID NO: 131 - DNA, 2791 bp, Homo sapiens; identical to SEQ ID NO: 130

SEQ ID NO: 132 - DNA, 3467 bp, Homo sapiens
gtgggtctgcacctggattttggagtcccagtgctgctgcagctctgagcattcccacgtcaccagagaagccggtgggcaatgagatcatgtctgctttcaggttgtggcctggcctgctgatcatgttgggttctctctgccatagaggttcaccgtgtggcctttcaacacacgtagaaataggacacagagctctggagtttcttcagcttcacaatgggcgtgttaactacagagagctgttactagaacaccaggatgcgtatcaggctggaatcgtgtttcctgattgtttttaccctagcatctgcaaaggaggaaaattccatgatgtgtctgagagcactcactggactccgtttcttaatgcaagcgttcattatatccgagagaactatccccttccctgggagaaggacacagagaaactggtagctttcttgtttggaattacttctcacatggcggcagatgtcagctggcatagtctgggccttgaacaaggattccttaggaccatgggagctattgattttcacggctcctattcagaggctcattcggctggtgattttggaggagatgtgttgagccagtttgaatttaattttaattaccttgcacgacgctggtatgtgccagtcaaagatctactgggaatttatgagaaactgtatggtcgaaaagtcatcaccgaaaatgtaatcgttgattgttcacatatccagttcttagaaatgtatggtgagatgctagctgtttccaagttatatcccacttactctacaaagtccccgtttttggtggaacaattccaagagtattttcttggaggactggatgatatggcattttggtccactaatatttaccatctaacaagcttcatgttggagaatgggaccagtgactgcaacctgcctgagaaccctctgttcattgcatgtggcggccagcaaaaccacacccagggctcaaaaatgcagaaaaatgattttcacagaaatttgactacatccctaactgaaagtgttgacaggaatataaactatactgaaagaggagtgttctttagtgtaaattcctggaccccggattccatgtcctttatctacaaggctttggaaaggaacataaggacaatgttcataggtggctctcagttgtcacaaaagcacgtctccagccccttagcatcttacttcttgtcatttccttatgcgaggcttggctgggcaatgacctcagctgacctcaaccaggatgggcacggtgacctcgtggtgggcgcaccaggctacagccgccccggccacatccacatcgggcgcgtgtacctcatctacggcaatgacctgggcctgccacctgttgacctggacctggacaaggaggcccacaggatccttgaaggcttccagccctcaggtcggtttggctcggccttggctgtgttggactttaacgtggacggcgtgcctgacctggccgtgggagctccctcggtgggctccgagcagctcacctacaaaggtgccgtgtatgtctactttggttccaaacaaggaggaatgtcttcttcccctaacatcaccatttcttgccaggacatctactgtaacttgggctggactctcttggctgcagatgtgaatggagacagtgaacccgatctggtcatcggctccccttttgcaccaggtggagggaagcagaagggaattgtggctgcgttttattctggccccagcctgagcgacaaagaaaaactgaacgtggaggcagccaactggacggtgagaggcgaggaagacttctcctggtttggatattcccttcacggtgtcactgtggacaacagaaccttgctgttggttgggagcccgacctggaagaatgccagcaggctgggccatttgttacacatccgagatgagaaaaagagccttgggagggtgtatggctacttcccaccaaacggccaaagctggtttaccatttctggagacaaggcaatggggaaactgggtacttccctttccagtggccacgtactgatgaatgggactctgaaacaagtgctgctggttggagcccctacgtacgatgacgtgtctaaggtggcattcctgaccgtgaccctacaccaaggcggagccactcgcatgtacgcactcacatctgacgcgcagcctctgctgctcagcaccttcagcggagaccgccgcttctcccgatttggtggcgttctgcacttgagtgacctggatgatgatggcttagatgaaatcatcatggcagcccccctgaggatagcagatgtaacctctggactgattgggggagaagacggccgagtatatgtatataatggcaaagagaccacccttggtgacatgactggcaaatgcaaatcatggataactccatgtccagaagaaaaggcccaatatgtattgatttctcctgaagccagctcaaggtttgggagctccctcatcaccgtgaggtccaaggcaaagaaccaagtcgtcattgctgctggaaggagttctttgggagcccgactctccggggcacttcacgtctatagccttggctcagattgaagatttcactgcatttccccactctgcccacctctctcatgctgaatcacatccatggtgagcattttgatggacaaagtggcacatccagtggagcggtggtagatcctgatagacatggggctcctgggagtagagagacacactaacagccacaccctctggaaatctgatacagtaaatatatgactgcaccagaaatatgtgaaatagcagacattctgcttactcatgtctccttccacagtttacttcctcgctccctttgcatctaaacctttcttctttcccaacttattgcctgtagtcagacctgctgtacaacctatttcctcttcctcttgaatgtctttccaatggctggaaaggtccctctgtggttatctgttagaacagtctctgtacacaattcctcctaaaaacatccttttttaaaaaaagaattgttcagccataaagaaagaacaagatcatgccctttgcagggacatggatggagctggaggccattatccttcataaactattgcaggaacagaaaaccaaacactccatattctcacttgtaagtgggagctaaatgagaacacgtggacacatagagggaaacaacacacactggggcctatgagagggcggaaggtgggaggagggagagatcaggaaaaataactaatggatacttagggtgatgaaataatctgtgtaacaaacccccatgacacacctttatgtatgtaacaaaccagcacttcctgcgcatgtacccctgaacttaaaagttaaaaaaaagttgaacttaaaaataacagattggcccatgccaatcaaagtataatagaaagcatagtatac

SEQ ID NO: 133 - DNA, 2435 bp, Homo sapiens
atgagccggagtctcttgctccggttcttgctgttcctgctcctgctcccgccgctccccgtcctgctcgcggacccaggggcgcccacgccagtgaatccctgttgttactatccatgccagcaccagggcatctgtgtccgcttcggccttgaccgctaccagtgtgactgcacccgcacgggctattccggccccaactgcaccatccctggcctgtggacctggctccggaattcactgcggcccagcccctctttcacccacttcctgctcactcacgggcgctggttctgggagtttgtcaatgccaccttcatccgagagatgctcatgcgcctggtactcacagtgcgctccaaccttatccccagtccccccacctacaactcagcacatgactacatcagctgggagtctttctccaacgtgagctattacactcgtattctgccctctgtgcctaaagattgccccacacccatgggaaccaaagggaagaagcagttgccagatgcccagctcctggcccgccgcttcctgctcaggaggaagttcatacctgacccccaaggcaccaacctcatgtttgccttctttgcacaacacttcacccaccagttcttcaaaacttctggcaagatgggtcctggcttcaccaaggccttgggccatggggtagacctcggccacatttatggagacaatctggagcgtcagtatcaactgcggctctttaaggatgggaaactcaagtaccaggtgctggatggagaaatgtacccgccctcggtagaagaggcgcctgtgttgatgcactacccccgaggcatcccgccccagagccagatggctgtgggccaggaggtgtttgggctgcttcctgggctcatgctgtatgccacgctctggctacgtgagcacaaccgtgtgtgtgacctgctgaaggctgagcaccccacctggggcgatgagcagcttttccagacgacccgcctcatcctcataggggagaccatcaagattgtcatcgaggagtacgtgcagcagctgagtggctatttcctgcagctgaaatttgacccagagctgctgttcggtgtccagttccaataccgcaaccgcattgccatggagttcaaccatctctaccactggcaccccctcatgcctgactccttcaaggtgggctcccaggagtacagctacgagcagttcttgttcaacacctccatgttggtggactatggggttgaggccctggtggatgccttctctcgccagattgctggccggatcggtgggggcaggaacatggaccaccacatcctgcatgtggctgtggatgtcatcagggagtctcgggagatgcggctgcagcccttcaatgagtaccgcaagaggtttggcatgaaaccctacacctccttccaggagctcgtaggagagaaggagatggcagcagagttggaggaattgtatggagacattgatgcgttggagttctaccctggactgcttcttgaaaagtgccatccaaactctatctttggggagagtatgatagagattggggctcccttttccctcaagggtctcctagggaatcccatctgttctccggagtactggaagccgagcacatttggcggcgaggtgggctttaacattgtcaagacggccacactgaagaagctggtctgcctcaacaccaagacctgtccctacgtttccttccgtgtgccggatgccagtcaggatgatgggcctgctgtggagcgaccatccacagagctctgaggggcaggaaagcagcattctggaggggagagctttgtgcttgtcattccagagtgctgaggccagggctgatggtcttaaatgctcattttctggtttggcatggtgagtgttggcgttgacatttagaactttaagtctcacccattatctggaatattgtgattctgtttattcttccagaatgctgaactccttgttagcccttcagattgttaggagtggttctcatttggtctgccagaatactgggttcttagttgacaacctagaatgtcagatttctggttgatttgtaacacagtcattctaggatgtggagctactgatgaaatctgctagaaagttagggggttcttattttgcattccagaatcttgactttctgattggtgattcaaagtgttgtgttccctggctgatgatccagaacagtggctcgtatcccaaatctgtcagcatctggctgtctagaatgtggatttgattcattttcctgttcagtgagatatcatagagacggagatcctaaggtccaacaagaatgcattccctgaatctgtgcctgcactgagagggcaaggaagtggggtgttcttcttgggacccccactaagaccctggtctgaggatgt

SEQ ID NO: 134 - DNA, 5093 bp, Homo sapiens
aggtgacagctggagggaggagcgggggtggagccgggggaagggtggggaggggatgggctggagctccgggcagtgtgcgaggcgcacgcacaggagcctgcactctgcgtcccgcaccccagcagccgcgccatgagccggagtctcttgctctggttcttgctgttcctgctcctgctcccgccgctccccgtcctgctcgcggacccaggggcgcccacgccagtgaatccctgttgttactatccatgccagcaccagggcatctgtgtccgcttcggccttgaccgctaccagtgtgactgcacccgcacgggctattccggccccaactgcaccatccctggcctgtggacctggctccggaattcactgcggcccagcccctctttcacccacttcctgctcactcacgggcgctggttctgggagtttgtcaatgccaccttcatccgagagatgctcatgcgcctggtactcacagtgcgctccaaccttatccccagtccccccacctacaactcagcacatgactacatcagctgggagtctttctccaacgtgagctattacactcgtattctgccctctgtgcctaaagattgccccacacccatgggaaccaaagggaagaagcagttgccagatgcccagctcctggcccgccgcttcctgctcaggaggaagttcatacctgacccccaaggcaccaacctcatgtttgccttctttgcacaacacttcacccaccagttcttcaaaacttctggcaagatgggtcctggcttcaccaaggccttgggccatggggtagacctcggccacatttatggagacaatctggagcgtcagtatcaactgcggctctttaaggatgggaaactcaagtaccaggtgctggatggagaaatgtacccgccctcggtagaagaggcgcctgtgttgatgcactacccccgaggcatcccgccccagagccagatggctgtgggccaggaggtgtttgggctgcttcctgggctcatgctgtatgccacgctctggctacgtgagcacaaccgtgtgtgtgacctgctgaaggctgagcaccccacctggggcgatgagcagcttttccagacgacccgcctcatcctcataggggagaccatcaagattgtcatcgaggagtacgtgcagcagctgagtggctatttcctgcagctgaaatttgacccagagctgctgttcggtgtccagttccaataccgcaaccgcattgccatggagttcaaccatctctaccactggcaccccctcatgcctgactccttcaaggtgggctcccaggagtacagctacgagcagttcttgttcaacacctccatgttggtggactatggggttgaggccctggtggatgccttctctcgccagattgctggccggatcggtgggggcaggaacatggaccaccacatcctgcatgtggctgtggatgtcatcagggagtctcgggagatgcggctgcagcccttcaatgagtaccgcaagaggtttggcatgaaaccctacacctccttccaggagctcgtaggagagaaggagatggcagcagagttggaggaattgtatggagacattgatgcgttggagttctaccctggactgcttcttgaaaagtgccatccaaactctatctttggggagagtatgatagagattggggctcccttttccctcaagggtctcctagggaatcccatctgttctccggagtactggaagccgagcacatttggcggcgaggtgggctttaacattgtcaagacggccacactgaagaagctggtctgcctcaacaccaagacctgtccctacgtttccttccgtgtgccggatgccagtcaggatgatgggcctgctgtggagcgaccatccacagagctctgaggggcaggaaagcagcattctggaggggagagctttgtgcttgtcattccagagtgctgaggccagggctgatggtcttaaatgctcattttctggtttggcatggtgagtgttggggttgacatttagaactttaagtctcacccattatctggaatattgtgattctgtttattcttccagaatgctgaactccttgttagcccttcagattgttaggagtggttctcatttggtctgccagaatactgggttcttagttgacaacctagaatgtcagatttctggttgatttgtaacacagtcattctaggatgtggagctactgatgaaatctgctagaaagttagggggttcttattttgcattccagaatcttgactttctgattggtgattcaaagtgttgtgttcctggctgatgatccagaacagtggctcgtatcccaaatctgtcagcatctggctgtctagaatgtggatttgattcattttcctgttcagtgagatatcatagagacggagatcctaaggtccaacaagaatgcattccctgaatctgtgcctgcactgagagggcaaggaagtggggtgttcttcttgggacccccactaagaccctggtctgaggatgtagagagaacaggtgggctgtattcacgccattggttggaagctaccagagctctatccccatccaggtcttgactcatggcagctgtttctcatgaagctaataaaattcgctttctaaagttacctgttatatatctcttttggtcccatcctctaaagcagaggcaacactggaacatggctagcctttcttgtagccatggctgggcgtgctagaggttgcagcatgagactttctgctgggatccttgggcccatcactgtatagacatgctaccactggtacttcctttctccctgcgggccaggcactgcccttttcaggaagctctcttaaaatacccattgccccagacctggaagatataacattcagttcccaccatctgattaaaacaacttcctcccttacagagcatacaacagagggggcacccggggaggagagcacatactgtgttccaatttcacgcttttaattctcatttgttctcacaccaacagtgtgaagtgcgtggtataatctccatttcaaaaccaaggaagcagcctcagagtggtcgagtgacacacctcacgcaggctgagtccagagcttgtgctcctcttgattcctggtttgactcagttccaggcctgatcttgcctgtctggctcagggtcaaagacagaatggtggagtgtagcctccacctgatattcaggctactcattcagtcccaaatatgtattttcctaagtgtttactatgtgccagttcctgtaacaggtgtggggacacagcagtgagtaatcaatacagacaaggttctgcccttatggagctcacactccagtggcagacaaacagaccataaataaggaaacgatgaaataagatatatacaaggtgagtgtgacttcccttctaaccccctctgctctgtcctcccctattgcgctctcaagaccagagacccaacagcagtgatctcagggcagacagccctccactccagctctgagacccttttctcaggacctctgtaggcagcagagagagaggacagaggggtaagatgaggggttgagggaaggttcttcatgatccacactttgggcttagtatttctcaggaagagctatggcccagaaacaacaggggaaactagagttcggtctgacagtccttggggttaagtctcctgtcttatggtccagaaactcctgtttctccttagttggctggaaactgctcccatcattccttctggcctctgctgaatgcagggaatgcaatccttccctgctcttgcagttgctctgacgtagaaagatccttcgggtgctggaagtctccatgaagagcttgtgtcctgtcctttcttgcagattctatttcccctcttctgctaatacctcttactttgcttgagaatcctctcctttcttattaatttcagtcttggtggttctatcaggggtgcattctggccaaggggtgggcctgtgaatcaatcctgggcaatcagacaccctctccttaaaaactggcccgtggagactgagatcactgactctgactcatccccacagctggctctgacaagatggtccatttgttcctgcttccgagatccccagggcagcctggatccctgcccttctcaagactttagcttttccttccatccggtggcctattccaggaattcctcttttgcttaaatcagttggagtttgtgtctgttgcttgtaatcaagcctttatggctgctgggctgagtgacacaagcactttaatggcctggagggacttttaatcagtgaagatgcaatcagacaagtgttttggaaagagcaccctcgagaagggtggatgacagggcagagcaggaaggacaggaagctggcagaacggaggaggctgcagccgtggtccaaccaggagctgatggcagctggggctaggggaagggctttgagggtggaaggatgggatgggttccagaggtattcctctcttaaatgcaagtgcctagattaggtagactttgcttagtattgacaactgcacatgaaagttttgcaaagggaaacaggctaaatgcaccaagaaagcttcttcagagtgaagaatcttaatgcttgtaatttaaacatttgttcctggagttttgatttggtggatgtgatggttggttttatttgtcagtttggttgggctatagcacacagttatttaatcaaacagtaatctaggtgtggctgtgaaggtattttgtagatgtgattaacatctacaatcagttgactttaagtgaaagagattacttaaataatttgggtgagctgcacctgattagttgaaaggcctcaagaacaaacactgcagtttcctggaaaagaagaaactttgcctcaagactatagccatcgactcctgcctgagtttccagcctgctagtctgccctatggatttgaagtttgccaaccccaacaattgtgtgaattaatttctaaaaataaagctatatacagcc

SEQ ID NO: 135 - DNA, 2380 bp, Homo sapiens
ccggatgccagtcaggatgatgggcctgctgttgagcgaccatccacagagctctgaggggcaggaaagcagcattctggaggggagagctttgtgcttgtcattccagagtgctgaggccagggctgatggtcttaaatgctcattttctggtttggcatggtgagtgttggggttgacatttagaactttaagtctcacccattattaggaatattgtgattctgtttattgttccagaatgctgaagtccttgttagcccttcagattgttaggagtggttctcatttggtctgccagaatactgggttcttagttgacaacctagaatgtcagatttctggttgatttgtaacacagtcattctaggatgtggagctactgatgaaatctgctagaaagttagggggttcttattttgcattggagaatcttgactttctgattggtgattcaaagtgttgtgttcctggctgatgatccagaacagtggctcgtatcccaaatctgtcagcatctggctgtctagaatgtggatttgattcattttcctgttcagtgagatatcatcgagacggagatcctaaggtccaacaagaatgcattccctgaatctgtgcctgcactgagagggcaaggaggtggggtgttcttcttgggacccccactaagaccctggtctgaggatgtagagagaacaggtgggctgtattcacgccattggttgcaagctaccagagctctatccccatccaggtcttgactcatggcagctgtttctcatgaagctaataaaattgcgtttctaaagttacctgttatatatctcttttggtcccatcctctaaagcagaggcaacactggaacatggctagcctttcttgtagccatggctgggcgtgctagaggttgcagcatgagactttctgctggcatccttgggcccatcactgtatagacatgctaccactggtacttcctttctccctgcgggccaggcactgccttttcaggaagctctcttaaaatacccattgccccagaccctggaagctctcccattcagttcccaccatctgattaaaacaacttcctcccttacagagcatacaacagagggggcaccggggaggagagcacatactgtgttccaatttcaaccttttaattctcatttgttctcacaccaccagtgtgaagtgcgtggtataatctccatttcaaaaccaaggaagcagcctcagagtggtcgagtgacacacctcacgcaggctgcgtccagagcttgtgctcctcttgattcctggtttgactcagttccaggcctaatcttgcctgtctggctcagggtcaaagacagaatggtggcgtgtagcctccacctgatattcaggctattcattcagtcccaaatatgtattttcctaagtgtttactatgtgccagttcctgtaacaggtgtggggacacagccgtgagtaatcaatacagacaaggttctgcccttatggagctgagactccagtggcagacaaacagaccataaataaggaaacgatgaaataagatatatacaaggtgagtgtgacttcccttctaaccccctctgctctgtcctcccctattgcgctctcaagaccagagacccaacagcagtgatgcttcagcaagcagccctccactccagctctgagacccttttctcaggacctctgtaggcagcagcgagagaggacagaggggtaagatgaggggttgagggaaggttcttcatgatccacactttgggcttagtatttctcaggaagagctatggcccagaaacaacaggggaaactagagttcggtctgacagtccttggggttaagtctcctgtcttatggtccagaaagtcctgtttctccttagttggctccaaactgctcccatcattccttctggcctctgctgaatgcagggaatgcaatccttccctgctcttgcagttgctctgacgtagaaagatccttcgggtgctggaagtctccatgaagagcttgtgtcctgtcctttcttgcagattctatttcccctcttctgctaatacctcttactttgcttgagaatcctctcctttcttattaatttcagtcttggtggttctatcaggggtgcattctggccaaggggtgggcctgtgaatcaatcctgggcaatcagacaccctctccttaaaaactggcccgtggagactgagatcactgactctgactcatccccacagctggctctgacaagatggtccatttgttcctgcttccgagatccccaggggcagcctggatccctgcccttctcaagactttagcttttccttccatccggtggcctattccag

SEQ ID NO: 136 - DNA, 3387 bp, Homo sapiens
gtccaggaactcctcagcagcgcctccttcagctccacagccagacgccctcagacagcaaagcctacccccgcgccgcgccctgcccgccgctgcgatgctcgcccgcgccctgctgctgtgcgcggtcctggcgctcagccatacagcaaatccttgctgttcccacccatgtcaaaaccgaggtgtatgtatgagtgtgggatttgaccagtataagtgcgattgtacccggacaggattctatggagaaaactgctcaacaccggaatttttgacaagaataaaattatttctgaaacccactccaaacacagtgcactacatacttacccacttcaagggattttggaacgttgtgaataacattcccttccttcgaaatgcaattatgagttatgtgttgacatccagatcacatttgattgacagtccaccaacttacaatgctgactatggctacaaaagctgggaagccttctctaacctctcctattatactagagcccttcctcctgtgcctgatgattgcccgactcccttgggtgtcaaaggtaaaaagcagcttcctgattcaaatgagattgtgggaaaattgcttctaagaagaaagttcatccctgatccccagggctcaaacatgatgtttgcattctttgcccagcacttcacgcatcagtttttcaagacagatcataagcgagggccagctttcaccaacgggctgggccatggggtggacttaaatcatatttacggtgaaactctggctagacagcgtaaactgcgccttttcaaggatggaaaaatgaaatatcagataattgatggagagatgtatcctcccacagtcaaagatactcaggcagagatgatctaccctcctcaagtccctgagcatctacggtttgctgtggggcaggaggtctttggtctggtgcctggtctgatgatgtatgccacaatctggctgagggaacacaacagagtatgcgatgtgcttaaacaggagcatcctgaatggggtgatgagcagttgttccagacaagcaggctaatactgataggagagactattaagattgtgattgaagattatgtgcaacacttgagtggctatcacttcaaactgaaatttgacccagaactacttttcaacaaacaattccagtaccaaaatcgtattgctgctgaatttaacaccctctatcactggcatccccttctgcctgacacctttcaaattcatgaccagaaatacaactatcaacagtttatctacaacaactctatattgctggaacatggaattacccagtttgttgaatcattcaccaggcaaattgctggcagggttgctggtggtaggaatgttccacccgcagtacagaaagtatcacaggcttccattgaccagagcaggcagatgaaataccagtcttttaatgagtaccgcaaacgctttatgctgaagccctatgaatcatttgaagaacttacaggagaaaaggaaatgtctgcagagttggaagcactctatggtgacatcgatgctgtggagctgtatcctgcccttctggtagaaaagcctcggccagatgccatctttggtgaaaccatggtagaagttggagcaccattctccttgaaaggacttatgggtaatgttatatgttctcctgcctactggaagccaagcacttttggtggagaagtgggttttcaaatcatcaacactgcctcaattcagtctctcatctgcaataacgtgaagggctgtccctttacttcattcagtgttccagatccagagctcattaaaacagtcaccatcaatgcaagttcttcccgctccggactagatgatatcaatcccacagtactactaaaagaacgttcgactgaactgtagaagtctaatgatcatatttatttatttatatgaaccatgtctattaatttaattatttaataatatttatattaaactccttatgttacttaacatcttctgtaacagaagtcagtactcctgttgcggagaaaggagtcatacttgtgaagacttttatgtcactactctaaagattttgctgttgctgttaagtttggaaaacagtttttattctgttttataaaccagagagaaatgagttttgacgtctttttacttgaatttcaacttatattataaggacgaaagtaaagatgtttgaatacttaaacactatcacaagatgccaaaatgctgaaagtttttacactgtcgatgtttccaatgcatcttccatgatgcattagaagtaactaatgtttgaaattttaaagtacttttgggtatttttctgtcatcaaacaaaacaggtatcagtgcattattaaatgaatatttaaattagacattaccagtaatttcatgtctactttttaaaatcagcaatgaaacaataatttgaaatttctaaattcatagggtagaatcacctgtaaaagcttgtttgatttcttaaagttattaaacttgtacatataccaaaaagaagctgtcttggatttaaatctgtaaaatcagatgaaattttactacaattgcttgttaaaatattttataagtgatgttcctttttcaccaagagtataaacctttttagtgtgactgttaaaacttccttttaaatcaaaatgccaaatttattaaggtggtggagccactgcagtgttatctcaaaataagaatatcctgttgagatattccagaatctgtttatatggctggtaacatgtaaaaaccccataaccccgccaaaaggggtcctacccttgaacataaagcaataaccaaaggagaaaagcccaaattattggttccaaatttagggtttaaactttttgaagcaaacttttttttagccttgtgcactgcagacctggtactcagattttgctatgaggttaatgaagtaccaagctgtgcttgaataacgatatgttttctcagattttctgttgtacagtttaatttagcagtccatatcacattgcaaaagtagcaatgacctcataaaatacctcttcaaaatgcttaaattcatttcacacattaattttatctcagtcttgaagccaattcagtaggtgcattggaatcaagcctggctacctgcatgctgttccttttcttttcttcttttagccattttgctaagagacacagtcttctcaaacacttcgtttctcctattttgttttactagttttaagatcagagttcactttctttggactctgcctatattttcttacctgaacttttgcaagttttcaggtaaacctcagctcaggactgctatttagctcctcttaagaagattaaaaaaaaaaaaaaag

SEQ ID NO: 137 - DNA, 1334 bp, Homo sapiens
cgccgcgtgcgcctgcagacgctccgctcgctgccttctctcctggcaggcgctgccttttctccccgttaaagggcacttgggctgaaggatcgctttgagatctgaggaacccgcagcgctttgagggacctgaagctgtttttcttcgttttcctttgggttcagtttgaacgggaggtttttgatccctttttttcagaatggattatttgctcatgattttctctctgctgtttgtggcttgccaaggagctccagaaacagcagtcttaggcgctgagctcagcgcggtgggtgagaacggcggggagaaacccactcccagtccaccctggcggctccgccggtccaagcgctgctcctgctcgtccctgatggataaagagtgtgtctacttctgccacctggacatcatttgggtcaacactcccgagcacgttgttccgtatggacttggaagccctaggtccaagagagccttggagaatttacttcccacaaaggcaacagaccgtgagaatagatgccaatgtgctagccaaaaagacaagaagtgctggaatttttgccaagcaggaaaagaactcagggctgaagacattatggagaaagactggaataatcataagaaaggaaaagactgttccaagcttgggaaaaagtgtatttatcagcagttagtgagaggaagaaaaatcagaagaagttcagaggaacacctaagacaaaccaggtcggagaccatgagaaacagcgtcaaatcatcttttcatgatcccaagctgaaaggcaatccctccagagagcgttatgtgacccacaaccgagcacattggtgacagaccttcggggcctgtctgaagccatagcctccacggagagccctgtggccgactctgcactctccaccctggctgggatcagagcaggagcatcctctgctggttcctgactggcaaaggaccagcgtcctcgttcaaaacattccaagaaaggttaaggagttcccccaaccatcttcactggcttccatcagtggtaactgctttggtctcttctttcatctggggatgacaatggacctctcagcagaaacacacagtcacattcgaattcgggtggcatcctccggagagagagagaggaaggagattccacacaggggtggagtttctgacgaaggtcctaagggagtgtttgtgtctgactcaggcgcctggcacatttcagggagaaactccaaagtccacacaaagattttctaaggaatgcacaaattgaaaacacactcaaaagacaaacatgcaagtaaagaaaaaaaaaaaaaaaaa

SEQ ID NO: 138 - DNA, 1296 bp, Homo sapiens
ccagcctgcgcgctccaccgccgctatggtctccgtgcctaccacctggtgctccgttgcgctagccctgctcgtggccctgcatgaagggaagggccaggctgctgccaccctggagcagccagcgtcctcatctcatgcccaaggcacccaccttcggcttcgccgttgctcctgcagctcctggctcgacaaggagtgcgtctacttctgccacttggacatcatctgggtgaacactcctgaacagacagctccttacggcctgggaaacccgccaagacgccggcgccgctccctgccaaggcgctgtcagtgctccagtgccagggaccccgcctgtgccaccttctgccttcgaaggccctggactgaagccggggcagtcccaagccggaagtcccctgcagacgtgttccagactggcaagacaggggccactacaggagagcttctccaaaggctgagggacatttccacagtcaagagcctctttgccaagcgacaacaggaggccatgcgggagcctcggtccacacattccaggtggaggaagagatagtgtcgtgagctggaggaacattgggaaggaagcccgcggggagagaggaggagagaagtggccagggcttgtggactctctgcctgcttcctggaccggggccttggtcccagacagctggacccatttgccaggattggcacaagctccctggtgagggagcctcgtccaaggcagttctgtgtcctcgcactgcccagggaagccctcggcctccagactgcggagcagcctccagtgctggctgctggcccacagctctgctggaagaactgcatggggagtacattcatctggaggctgcgtcctgaggagtgtcctgtctgctgggctacaaaccaggagcaaccgtgcagccacgaacacgcatgcctcagccagccctggaggctggatggctcccctgaggctggcatcctggctggctgtgtcctctccagctttccctccccagagttcttgcaccctcattccctcgggaccctcccagtgagaagggcctgctctgcttttcctgtctgtatataacttatttgccctaagaactttgagaatcccaattatttattttaatgtattttttagaccctctatttacctgcgaacttgtgtttataataaatgaggaaacataaaaaaaaaaaaaaaaaaaaaaaaaaaaaaaaaaaaaaaaaaaaaaaaaaaaaaaaaaaaaaaaaaaaaaaaaaaaaaaaaaaaaaaaaaaaaaaaaaaaa

SEQ ID NO: 139 - DNA, 1651 bp, Homo sapiens
ctgcgaaccctctctactctccgaagggaattgtccttcctggcttccactacttccacccctgaatgcacaggcagcccggcccaagtctcccactagggatgcagatggattcggtgtgaagggctggctgctgttgcctccggctcttgaaagtcaagttcagaggcgtgcaaagactccagaattggaggcatgatgaagactctgctgctgtttgtggggctgctgctgacctgggagagtgggcaggtcctgggggaccagacggtctcagacaatgagctccaggaaatgtccaatcagggaagtaagtacgtcaataaggaaattcaaaatgctgtcaacggggtgaaacagataaagactctcatagaaaaaacaaacgaagagcgcaagacactgctcagcaacctagaagaagccaagaagaagaaagaggatgccctaaatgagaccagggaatcagagacaaagctgaaggagctcccaggagtgtgcaatgagaccatgatggccctctgggaagagtgtaagccctgcctgaaacagacctgcatgaagttctacgcacgcgtctgcagaagtggctcaggcctggttggccgccagcttgaggagttcctgaaccagagctcgcccttctacttctggatgaatggtgaccgcatcgactccctgctggagaacgaccggcagcagacgcacatgctggatgtcatgcaggaccacttcagccgcgcgtccagcatcatagacgagctcttccaggacaggttcttcacccgggagccccaggatacctaccactacctgcccttcagcctgccccaccggaggcctcacttcttctttcccaagtcccgcatcgtccgcagcttgatgcccttctctccgtacgagcccctgaacttccacgccatgttccagcccttccttgagatgatacacgaggctcagcaggccatggacatccacttccatagcccggccttccagcacccgccaacagaattcatacgagaaggcgacgatgaccggactgtgtgccgggagatccgccacaactccacgggctgcctgcggatgaaggaccagtgtgacaagtgccgggagatcttgtctgtggactgttccaccaacaacccctcccaggctaagctgcggcgggagctcgacgaatccctccaggtcgctgagaggttgaccaggaaatacaacgagctgctaaagtcctaccagtggaagatgctcaacacctcctccttgctggagcagctgaacgagcagtttaactgggtgtcccggctggcaaacctcacgcaaggcgaagaccagtactatctgcgggtcaccacggtggcttcccacacttctgactcggacgttccttccggtgtcactgaggtggtcgtgaagctctttgactctgatcccatcactgtgacggtccctgtagaagtctccaggaagaaccctaaatttatggagaccgtggcggagaaagcgctgcaggaataccgcaaaaagcaccgggaggagtgagatgtggatgttgcttttgcacctacgggggcatctgagtccagctccccccaagatgagctgcagccccccagagagagctctgcacgtcaccaagtaaccaggc

SEQ ID NO: 140 - DNA, 1676 bp, Homo sapiens
gaattccgccgctgaccgaggcgtgcaaagactccagaattggaggcatgatgaagactctgctgctgtttgtggggctgctgctgacctgggagagtgggcaggtcctgggggaccagacggtctcagacaatgagctccaggaaatgtccaatcagggaagtaagtacgtcaataaggaaattcaaaatgctgtcaacggggtgaaacagataaagactctcatagaaaaaacaaacgaagagcgcaagacactgctcagcaacctagaagaagccaagaagaagaaagaggatgccctaaatgagaccagggaatcagagacaaagctgaaggagctcccaggagtgtgcaatgagaccatgatggccctctgggaagagtgtaagccctgcctgaaacagacctgcatgaagttctacgcacgcgtctgcagaagtggctcaggcctggttggccgccagcttgaggagttcctgaaccagagctcgcccttctacttctggatgaatggtgaccgcatcgactccctgctggagaacgaccggcagcagacgcacatgctggatgtcatgcaggaccacttcagccgcgcgtccagcatcatagacgagctcttccaggacaggttcttcacccgggagccccaggatacctaccactacctgcccttcagcctgccccaccggaggcctcacttcttctttcccaagtcccgcatcgtccgcagcttgatgcccttctctccgtacgagcccctgaacttccacgccatgttccagcccttccttgagatgatacacgaggctcagcaggccatggacatccacttccacagcccggccttccagcacccgccaacagaattcatacgagaaggcgacgatgaccggactgtgtgccgggagatccgccacaactccacgggctgcctgcggatgaaggaccagtgtgacaagtgccgggagatcttgtctgtggactgttccaccaacaacccctcccaggctaagctgcggcgggagctcgacgaatccctccaggtcgctgagaggttgaccaggaaatacaacgagctgctaaagtcctaccagtggaagatgctcaacacctcctccttgctggagcagctgaacgagcagtttaactgggtgtcccggctggcaaacctcacgcaaggcgaagaccagtactatctgcgggtcaccacggtggcttcccacacttctgactcggacgttccttccggtgtcactgaggtggtcgtgaagctctttgactctgatcccatcactgtgacggtccctgtagaagtctccaggaagaaccctaaatttatggagaccgtggcggagaaagcgctgcaggaataccgcaaaaagcaccgggaggagtgagatgtggatgttgcttttgcaccttacgggggcatcttgagtccagctccccccaagatgagctgcagccccccagagagagctctgcacgtcaccaagtaaccaggccccagcctccaggcccccaactccgcccagcctctccccgctctggatcctgcactctaacactcgactctgctgctcatgggaagaacagaattgctcctgcatgcaactaattcaataaaactgtcttgtgagctgaaaaaaaaaaaaaaaaaaaaaaaaaaggaattc

SEQ ID NO: 141 - DNA, 4205 bp, Homo sapiens
  misc_feature (4097)..(4097): n is a, c, g, or t
cactcctggagcccgcggaccccgagcacgcgcctgacagcccctgctggcccggcgcgcggcgtcgccaggccagctatggcccccgacccggtggccgccgagaccgcggctcagggacctaccccgcgctacttcacctgggacgaggtggcccagcgctcagggtgcgaggagcggtggctagtgatcgaccgtaaggtgtacaacatcagcgagttcacccgccggcatccagggggctcccgggtcatcagccactacgccgggcaggatgccacggatccctttgtggccttccacatcaacaagggccttgtgaagaagtatatgaactctctcctgattggagaactgtctccagagcagcccagctttgagcccaccaagaataaagagctgacagatgagttccgggagctgcgggccacagtggagcggatggggctcatgaaggccaaccatgtcttcttcctgctgtacctgctgcacatcttgctgctggatggtgcagcctggctcaccctttgggtctttgggacgtcctttttgcccttcctcctctgtgcggtgctgctcagtgcagttcaggcccaggctggctggctgcagcatgactttgggcacctgtcggtcttcagcacctcaaagtggaaccatctgctacatcattttgtgattggccacctgaagggggcccccgccagttggtggaaccacatgcacttccagcaccatgccaagcccaactgcttccgcaaagacccagacatcaacatgcatcccttcttctttgccttggggaagatcctctctgtggagcttgggaaacagaagaaaaaatatatgccgtacaaccaccagcacaaatacttcttcctaattgggcccccagccttgctgcctctctacttccagtggtatattttctattttgttatccagcgaaagaagtgggtggacttggcctggatgattaccttctacgtccgcttcttcctcacttatgtgccactattggggctgaaagccttcctgggccttttcttcatagtcaggttcctggaaagcaactggtttgtgtgggtgacacagatgaaccatattcccatgcacattgatcatgaccggaacatggactgggtttccacccagctccaggccacatgcaatgtccacaagtctgccttcaatgactggttcagtggacacctcaacttccagattgagcaccatctttttcccacgatgcctcgacacaattaccacaaagtggctcccctggtgcagtccttgtgtgccaagcatggcatagagtaccagtccaagcccctgctgtcagccttcgccgacatcatccactcactaaaggagtcagggcagctctggctagatgcctatcttcaccaataacaacagccaccctgcccagtctggaagaagaggaggaagactctggagccaaggcagaggggagcttgagggacaatgccactatagtttaatactcagagggggttgggtttggggacataaagcctctgactcaaactcctcccttttatcttctagccacagttctaagacccaaagtggggggtggacacagaagtccctaggagggaaggagctgttggggcaggggtgtaaattatttcctttttctagtttggcacatgcaggtagttggtgaacagagagaaccaggagggtaacagaagaggagggacctactgaacccagagtcaggaagagatttaacactaaaattccactcatgccgggcgtggtgcacgcgcctgtaatcccagctacccaggaggctgaggcaggagaatcgcttgaaccggggaggtggaggttgcagtgagctgagatcacgccattgtactccagcctgggcgacagagcaagactccatttcaaaaaaaaaaaaaaaaaaaaaaatccactcatataaaaggtgagctcagctcactggtccatttctcagtggcttctccatcctcatttgcaaacctcagagggataaggcagttgaacctgatgagcaagaattataacagcaaggaaacattaatgcttagaattctgagatccagcacaactcagtctgtgggagctcagctcgctgcccagggataggtatgacctatgtctgccttaggctgctgggagatgccattctccagtttcagaagcaggcagggcaaaggtcaagactgtggtattggggtcttttggctctgaaggatcctggaaccactgattttggtttattccctccagggtctaaagagaacaagaggtgctagctcttaccaaaacagatggtagagagagttgctggctatttaaaaagctctttcatcttttaattcacctcttcttttcacctctttaaccactcctcaggaacagaacacttctaggactgggggtcttttagctccataagcaagtgagcagatgggacaagttagtcttttctccctagaaacaaaggggatgcccagtggtttccctttgcttcccaacctaaaatttcaagtttaataaaatagcaattagcagaagtgaccaaattgggagataattatcagtcatgaggaaagacacagatttcggtcataaagaatgtaagggctataagtagaaactttctataacctaaatgatgttatagaattatttttgagcaggagcagaaagattaaatatgatcacttcatacttctaaatcagaaataggaagattaaaaccacagaacagtttgtgatttctattgctggtagctaggtatcttactctgtccactcttgttcaagtatctaactcttctggaaaccaaataggctttagaagagattatcctatattcctatcagtataatactaaaatgtaactttttaatcatctggtttttaaaagataaacagtttagcccatctctccagagagcaaacataggaatatgactcaggagcctcctagggcttatcatcagccctcacacccgcttccccctccaacccacagcctttgcttccaggtggcaggattactactttgcctcttcagcagcatctactctaggcatattgatcattttagacactgggagaagagaacctcaaactaggaggaaaagacagagcctccacttagttttgggaggggatggcagacagtcaaggagatgagcgtcctaaggcatgttgggatagggtcagatgcaccacccatggagaggtttgtcaacacaaagacatggaaggttagaggtttgtcaacaaaaagacatggaaggttaggtttgtcaacacaaagacatggaagattagaggtttgtcaacacaaagatacaggaagaatgggctgcagaagatttagatgttttccatttgggcacattttacttagctggagaactaggtttaaaacagcctgggtaggaaaattagaagcaagctggatgcagtggctcatgcctgtaatcccaacacttttgggaggtccaggcaggaggatcacttgggcccaggaggtcaagcctgcagcgagctgagatcacaccactgcactccagcctggggtgatagaacaagaccctgtctcaaaaaaaaaaaaaaacaacaaaaacttagaattgaggagttgtacctccattggcttcctcactccaaaataggtgctgatccttcctattcctattctttgccaccttttgggtgtggtgtcaccagcctgtttagccaagtagctttgggcataggctgcccaatctgagcaaacaccagtgaggctctattgagcaagaccaagtcctcaaagcacctgaaccactgtggccttctcagcctacagcagtgtggtctcttacatggccacaaagggacacacagtgacaaaaggctcggaatgttacaatggtaaaatgagtgatctcaaatccactgacagatataaaataggcttagagaggaaaagctgcctctggtcaagtagatcatggcagcatgaattccaactcacttttttacgaactccaacttctatgtttatctttgttactttcacttttttacaacctgncagaggcattttttaaatcaggcccaatatcagtattctttttgtgtgtgccaattttgttatcacatccctatgaagttgaaaaataaagttaattttgaccaaaag

SEQ ID NO: 142 - DNA, 2995 bp, Homo sapiens
tcttcctcagcatttcctgccaacccttttctggtttctgtttcttcaacctctttttgttttatggtcccttttatggtattttctcttatttctaggaaaacattaatgataggtttttgaacacttcccctgagtagtctctgttgcaggttgcttttttgtttgctctgccctctgtctttcatactagaggccttgctcaaatgtctggtgaccttggcaatgtgctaatatttaaaaaccaagaacaaaaaaattaattggtaaccctgaacatgagtggagcttgtcaactggatttcactttttgatagtctggcagagactttttcttcaggaacttccagcgacaatatctttaaagcttttttcttgagccaatcagattctctgagaagttgcttcctatcttctgcccggaaagaaaaatcttgtctggcagcattctcgcagctaggtgatgactaaagcagggatttttaccattcagtatggaagcttttgtttaattcacctgtttttcacctgatttccatcagtcccaagttgatctcttacactctttctagagactagaccttactctgctgctgaaaagaaagaagagagagaattggtaaaagggttttgagactctacttcataaacaagctttaaaccagttcttatatctacagcctatctttaccctcatttccagaagtacctggtgctgtcaattcctgtgctatttggagtttcaagatataaatcaggttatttcttggttttctccatggatagcttaggatttagctttctctgctctgtaaagctatccatcttactttctaagctttcaaatttttggtagggttttctctttccctatttggctttgtatattgatgtcttttttatttttttactgccattggagagggttttcaggaaggagcagaggctaatgcatgcgtgtcacttactatctttaactgcaagttcaattctaattaatatctattccatttgcatcacaattgattcatgatctcagatgactcacagagattttacctacagctgttatctaggctcctttatctatttttccttcccggatattgtttagattccattggcttacatcgagtagagaacatcagccatacggaacctgctgtgagccttcacttgtacagtccaccttttgatacatgccatgcctttgatcaaagaacaggacataaaaacaaagtcacaatgacattccatagtaaatttggaatcagaactccaaatgtgagtataatttcttctaggtttaaatgctctgtaggttggcactgttacactgcatgtatgcaaagaatgagatgagtcttaattcatggataaggcccaatatatcttgattgttttatttaactttagcgactatcttttcaatttatttttaaaaacttattatgttagatccaaacattagttgagaaatttcaaaatgtatgcttgtttttaaagaaaatgttttcatttacttgggaaatgagagtgaaaactattatttgatataactgttactgccatggcttactatgcataggtctaatttgctgggccaacagggataagttgcataattaacctttgtaaaggttattggctgatgatataactaaagcaaattgtctgttttgtttgccaatgttgcttattcttagagttgttatgccatttataccacaaataagaatagactatactaacatgttcctccttgagaaacaagcatttcctaccaaaaataaaaaggcaaccaacactaatatagcagggcagtcttctacctctgaaataagtttgtcatttagaggaatagtctttaattatcagaatatccagaaatagacaatgtgtgaaaatggagacccaagcaatccttgagtcttaatgaaagcgcagcctctgagggaagccagggcagaattttctcattatcgctccgcttcatctttatcttccacattccaaaccctaagagatattcttattgcgggaaaaacaacaaggctcccttgcccttgctgagttttcatacactgctacaaaagcagaactatttagaaggagttaaaatgtcttttgtaaagtttcttacacagctttctttttttcccttttttacaggcaacttcgggctcgctggagaacaactaaggggcaccaaagccctctgaggttttactttaaggttcgctgtatgtttgccttggacaaaaaggctacctaccacgtgctatccagtaatatacttaaataagccaatacttagatctactgtaaggcagatgctaattataaggcattaagtaagcaaatagtgccctcagctactgcagaagaaaagtcccactgaggaaaagaaagtcttgtgatttttaaaggcaagttttcaagtgctctcatagttctatcctctaattccattaaatccatactaggagcgtcagtgagggttttcatagcttttggaaatactttggtctctgaactgtaattagcgcaagaagtaaaaacagaaacgtcaaacgtcaaatgtttgctttgttacctggaggactaaatgtagatgtctttagtatactttgtatgttcttaaatattggaagataattttgtgaatctgtagattttattttttcagtcttaccttacaaatttcttttctatgaataatagaggaactcacggcactctgccacttgttaatgaaaggaagtgcagaggatttagaaaagtacatgatccccagaccacaacaaaccaaaacataaactcatgtctgtgtcccatggtcatagtcaaagattttgtactgctaaaattaccaaataatttaaataaagtggatttgaacacaatttgaaggtgtctttctgattaacatgatagaaacttcacataaatcagtttcttagatctagatatacaaaagcactgtgacaaatgg

SEQ ID NO: 143 - DNA, 1633 bp, Homo sapiens
ctgagctgcatcatggtgcggtctgtggcctgggcaggtttcatggtcctgctgatgatcccatggggctctgctgcaaaactggtctgctacttcaccaactgggcccagtacagacagggggaggctcgcttcctgcccaaggacttggaccccagcctttgcacccacctcatctacgccttcgctggcatgaccaaccaccagctgagcaccactgagtggaatgacgagactctctaccaggagttcaatggcctgaagaagatgaatcccaagctgaagaccctgttagccatcggaggctggaatttcggcactcagaagttcacagatatggtagccacggccaacaaccgtcagacctttgtcaactcggccatcaggtttctgcgcaaatacagctttgacggccttgaccttgactgggagtacccaggaagccaggggagccctgccgtagacaaggagcgcttcacaaccctggtacaggacttggccaatgccttccagcaggaagcccagacctcagggaaggaacgccttcttctgagtgcagcggttccagctgggcagacctatgtggatgctggatacgaggtggacaaaatcgcccagaacctggattttgtcaaccttatggcctacgacttccatggctcttgggagaaggtcacgggacataacagccccctctacaagaggcaagaagagagtggtgcagcagccagcctcaacgtggatgctgctgtgcaacagtggctgcagaaggggacccctgccagcaagctgatccttggcatgcctacctacggacgctccttcacactggcctcctcatcagacaccagagtgggggccccagccacagggtctggcactccaggccccttcaccaaggaaggagggatgctggcctactatgaagtctgctcctggaagggggccaccaaacagagaatccaggatcagaaggtgccctacatcttccgggacaaccagtgggtgggctttgatgatgtggagagcttcaaaaccaaggtcagctatctgaagcagaagggactgggcggggccatggtctgggcactggacttagatgactttgccggcttctcctgcaaccagggccgataccccctcatccagacgctacggcaggaactgagtcttccatacttgccttcaggcaccccagagcttgaagttccaaaaccaggtcagccctctgaacctgagcatggccccagccctggacaagacacgttctgccagggcaaagctgatgggctctatcccaatcctcgggaacggtccagcttctacagctgtgcagcggggcggctgttccagcaaagctgcccgacaggcctggtgttcagcaactcctgcaaatgctgcacctggaattgagtcgtaaagcccctccagtccagctttgaggctgggcccaggatcactctacagcctgcctcctgggttttcctgggggccgcaatctggctcctgcaggcctttctgtggtcttcctttatccaggctttctgctctcagccttgccttccttttttctgggtctcctgggctgcccctttcacttgcaaaataaatctttggtttgtgcccctcttca

SEQ ID NO: 144 - DNA, 1625 bp, Homo sapiens
gctttccagtctggtggtgaatcctccatagtctgaagcctttgtgataaccacagaatcagaacatataaaaagctctgcgggactggtgctgactgcaaccatgacaaagcttattctcctcacaggtcttgtccttatactgaatttgcagctcggctctgcctaccagctgacatgctacttcaccaactgggcccagtaccggccaggcctggggcgcttcatgcctgacaacatcgacccctgcctctgtacccacctgatctacgcctttgctgggaggcagaacaacgagatcaccaccatcgaatggaacgatgtgactctctaccaagctttcaatggcctgaaaaataagaacagccagctgaaaactctcctggccattggaggctggaacttcgggactgcccctttcactgccatggtttctactcctgagaaccgccagactttcatcacctcagtcatcaaattcctgcgccagtatgagtttgacgggctggactttgactgggagtaccctggctctcgtgggagccctcctcaggacaagcatctcttcactgtcctggtgcaggaaatgcgtgaagcttttgagcaggaggccaagcagatcaacaagcccaggctgatggtcactgctgcagtagctgctggcatctccaatatccagtctggctatgagatcccccaactgtcacagtacctggactacatccatgtcatgacctacgacctccatggctcctgggagggctacactggagagaacagccccctctacaaatacccgactgacaccggcagcaacgcctacctcaatgtggattatgtcatgaactactggaaggacaatggagcaccagctgagaagctcatcgttggattccctacctatggacacaacttcatcctgagcaacccctccaacactggaattggtgcccccacctctggtgctggtcctgctgggccctatgccaaggagtctgggatctgggcttactacgagatctgtaccttcctgaaaaatggagccactcagggatgggatgcccctcaggaagtgccttatgcctatcagggcaatgtgtgggttggctatgacaacatcaagagcttcgatattaaggctcaatggcttaagcacaacaaatttggaggcgccatggtctgggccattgatctggatgacttcactggcactttctgcaaccagggcaagtttcccctaatctccaccctgaagaaggccctcggcctgcagagtgcaagttgcacggctccagctcagcccattgagccaataactgctgctcccagtggcagcgggaacgggagcgggagtagcagctctggaggcagctcgggaggcagtggattctgtgctgtcagagccaacggcctctaccccgtggcaaataacagaaatgccttctggcactgcgtgaatggagtcacgtaccagcagaactgccaggccgggcttgtcttcgacaccagctgtgattgctgcaactgggcataaacctgacctggtctatattccctagagttccagtctcttttgcttaggacatgttgcccctacctaaagtcctgcaataaaatcagcagtc

SEQ ID NO: 145 - DNA, 1413 bp, Homo sapiens
cgggccggctcaggcagagacgcggcaccatggctagcaagaaagtctgcattgtaggctccgggaactggggctcagccatcgccaagatcgtgggtggcaatgcagcccagctcgcacagtttgacccacgggtgaccatgtgggtatttgaggaagacattggaggcaaaaagctgactgagatcatcaacacgcagcatgagaatgtcaaatacctgccagggcacaagttgcccccaaatgtggtggctgtcccagatgtggtccaggctgcagaggatgctgacatcctgatctttgtggtgccccatcagttcatcggcaagatctgtgaccagctcaagggccatctgaaggcaaaccccactggcatatctcttattaagggggtagacgagggccccaatgggctgaagctcatctcggaagtgattggggagcgcctcggcatccccatgagtgtgctgatgggggccaacattgccagcgaggtggctgatgagaagttctgtgagacaaccattggctgcaaggacccggcccagggacaactcctgaaagagctgatgcagacaccaaacttccgtatcacagtggtgcaagaggtggacacagtagagatctgtggagccttaaagaatgtagtggccgtgggggctggcttctgtgatggcctgggctttggcgacaacaccaaggcggcagtgatccggctgggactcatggagatgatagccttcgccaagctcttctgcagtggccctgtgtcctctgccaccttcttggagagctgtggtgttgctgacctgatcactacctgctatggagggcggaaccggaaagtggctgaggcctttgcgcgtacaggaaagtccattgagcagctggagaaagagttgctgaatgggcagaaactgcaggggcccgagacagcccgggagctatacagcatcctccagcacaagggcctggtagacaagtttcccttgttcatggctgtgtacaaggtgtgctacgagggccagccagtgggtgaattcatccactgcctgcagaatcatccagaacatatgtgagtggggccaggcccaggccaggcgtttttaccccagtggagaccagcagaagcctggggtacctagtcaccaggatctccaggactcccagggagcagagtcttctcatcgtttcactggaggacaggtggctatggggcccagctacgcacctggagatcctgaactgtcaagccactggcagcctcatgccaccacattcgccagaaatgcagttgccctgtccctctccagatgtggggctttctccatatcctctgggaggggtggaatcaagccccagtgctgcctgcttggtggcgggggtgatgtatgtggagaagggtcggggccg

SEQ ID NO: 146 - DNA, 1486 bp, Homo sapiens
gaattccaaatgcactcaagcagagaagaaatccacaagtactcaccagcctcctggtctgcagagaagacagaatcaatatgagcacagcaggaaaagtaatcaaatgcaaagcagctgtgctatgggagttaaagaaacccttttccattgaggaggtagaggttgcacctcctaaggctcatgaagttcgcattaagatggtggctgcaggaatctgtcgttcagatgagcatgtggttagtggcaacctggtgaccccccttcctgtgattttaggccatgaggcagccggcatcgtggaaagtgttggagaaggggtgactacagtcaaaccaggtgataaagtcatcccgctctttactcctcagtgtggaaaatgcagaatttgtaaaaacccagaaagcaactactgcttgaaaaatgatctaggcaatcctcgggggaccctgcaggatggcaccaggaggttcacctgcagcgggaagcccatccaccacttcgtcggcgtcagcaccttctcccagtacacagtggtggatgagaatgcagtggccaaaattgatgcagcctcgcccctggagaaagtctgcctcattggctgtggattttcgactggttatgggtctgcagtcaaagttgccaaggtcaccccagggtctacctgtgctgtgtttggcctgggaggggtcggcctatctgttgttatgggctgtaaagcagctggagcagccagaatcattgctgtggacatcaacaaggacaaatttgcaaaggctaaagagttgggggccactgaatgcatcaaccctcaagactacaagaaacccattcaggaagtgctaaaggaaatgactgatggaggtgtggatttttcgtttgaagtcatcggtcggcttgacaccatgatggcttccctgttatgttgtcatgaggcatgtggcacaagtgtcattgtaggggtacctcctgattcccagaacctctcaataaaccctatgctgctactgactggacgcacgtggaaaggagctatttttggaggctttaagagtaaagaatctgtcccgaaacttgtggctgactttatggctaagaagttttcactggatgcattaataacaaatattttaccttttgaaaaaataaatgaaggatttgacctgcttcgctctggaaagagtatccgtaccgtcctgacgttttgaaacaatacagatgccttcccttgtagcagttttcagcctcctctaccctacatgatctggagcaacagctaggaaatatcattaattctgctcttcagagatgttaaaaataaattacacgtgggagctttccaaagaaatggaaattgatgggaaattatttgtcaagcaaatgtttaaaatccaaatgagaactaaataaagtgttgaacatcaactggggaattgaagccaataaaccttccttcttaaccattcaaaaaaaaaaaaaggaattc

SEQ ID NO: 147 - DNA, 1332 bp, Homo sapiens
cggactagacctggtcagacacaatgttggcactcttggttctggtgactgtggccctggcatctgctcatcatggtggtgagcactttgaaggcgagaaggtgttccgtgttaacgttgaagatgaaaatcacattaacataatccgcgagttggccagcacgacccagattgacttctggaagccagattctgtcacacaaatcaaacctcacagtacagttgacttccgtgttaaagcagaagatactgtcactgtggagaatgttctaaagcagaatgaactacaatacaaggtactgataagcaacctgagaaatgtggtggaggctcagtttgatagccgggttcgtgcaacaggacacagttatgagaagtacaacaagtgggaaacgatagaggcttggactcaacaagtcgccactgagaatccagccctcatctctcgcagtgttatcggaaccacatttgagggacgcgctatttacctcctgaaggttggcaaagctggacaaaataagcctgccattttcatggactgtggtttccatgccagagagtggatttctcctgcattctgccagtggtttgtaagagaggctgttcgtacctatggacgtgagatccaagtgacagagcttctcgacaagttagacttttatgtcctgcctgtgctcaatattgatggctacatctacacctggaccaagagccgattttggagaaagactcgctccacccatactggatctagcattggcacagaccccaacagaaattttgatgctggttggtgtgaaattggagcctctcgaaacccctgtgatgaaacttactgtggacctgccgcagagtctgaaaaggagaccaaggccctggctgatttcatccgcaacaaactctcttccatcaaggcatatctgacaatccactcgtactcccaaatgatgatctacccttactcatatgcttacaaactcggtgagaacaatgctgagttgaatgccctggctaaagctactgtgaaagaacttgcctcactgcacggcaccaagtacacatatggcccgggagctacaacaatctatcctgctgctgggggctctgacgactgggcttatgaccaaggaatcagatattccttcacctttgaacttcgagatacaggcagatatggctttctccttccagaatcccagatccgggctacctgcgaggagaccttcctggcaatcaagtatgttgccagctacgtcctggaacacctgtactagttgagaaagctgatggccttgtttcaaaattctcatttttcatttcttttctttcttg

SEQ ID NO: 148 - DNA, 2684 bp, Homo sapiens
tttaaagctgggaggttctgccaccaagcacggccttcccactgggaacacaaacttgctggcgggaagagcccggaaagaaacctgtggatctcccttcgagatcatccaaagagaagaaaggtgacctcacattcgtgccccttagcagcactctgcagaaatgcctcctcagctgcaaaacggcctgaacctctcggccaaagttgtccagggaagcctggacagcctaccccaggcagtgagggagtttctcgagaataacgctgagctgtgtcagcctgatcacatccacatctgtgacggctctgaggaggagaatgggcggcttctgggccagatggaggaagagggcatcctcaggcggctgaagaagtatgacaactgctggttggctctcactgaccccagggatgtggccaggatcgaaagcaagacggttatcgtcacccaagagcaaagagacacagtgcccatccccaaaacaggcctcagccagctcggtcgctggatgtcagaggaggattttgagaaagcgttcaatgccaggttcccagggtgcatgaaaggtcgcaccatgtacgtcatcccattcagcatggggccgctgggctcgcctctgtcaaagatcggcatcgagctgacggattcaccctacgtggtggccagcatgcggatcatgacgcggatgggcacgcccgtcctggaagcagtgggcgatggggagtttgtcaaatgcctccattctgtggggtgccctctgcctttacaaaagcctttggtcaacaactggccctgcaacccggagctgacgctcatcgcccacctgcctgaccgcagagagatcatctcctttggcagtgggtacggcgggaactcgctgctcgggaagaagtgctttgctctcaggatggccagccggctggccaaggaggaagggtggctggcagagcacatgctgattctgggtataaccaaccctgagggtgagaagaagtacctggcggccgcatttcccagcgcctgcgggaagaccaacctggccatgatgaaccccagcctccccgggtggaaggttgagtgcgtcggggatgacattgcctggatgaagtttgacgcacaaggtcatttaagggccatcaacccagaaaatggctttttcggtgtcgctcctgggacttcagtgaagaccaaccccaatgccatcaagaccatccagaagaacacaatctttaccaatgtggccgagaccagcgacgggggcgtttactgggaaggcattgatgagccgctagcttcaggtgtcaccatcacgtcctggaagaataaggagtggagctcagaggatggggaaccttgtgcccaccccaactcgaggttctgcacccctgccagccagtgccccatcattgatgctgcctgggagtctccggaaggtgttcccattgaaggcattatctttggaggccgtagacctgctggtgtccctctagtctatgaagctctcagctggcaacatggagtctttgtgggggcggccatgagatcagaggccacagcggctgcagaacataaaggcaaaatcatcatgcatgacccctttgccatgcggcccttctttggctacaacttcggcaaatacctggcccactggcttagcatggcccagcacccagcagccaaactgcccaagatcttccatgtcaactggttccggaaggacaaggaaggcaaattcctctggccaggctttggagagaactccagggtgctggagtggatgttcaaccggatcgatggaaaagccagcaccaagctcacgcccataggctacatccccaaggaggatgccctgaacctgaaaggcctggggcacatcaacatgatggagcttttcagcatctccaaggaattctgggagaaggaggtggaagacatcgagaagtatctggaggatcaagtcaatgccgacctcccctgtgaaatcgagagagagatccttgccttgaagcaaagaataagccagatgtaatcagggcctgagtgctttacctttaaaatcattccctttcccatccataaggtgcagtaggagcaagagagggcaagtgttcccaaattgacgccaccataataatcatcaccacaccgtgagcagatctgaaaggcacactttgatttttttaaggataagaaccacagaacactgggtagtagctaatgaaattgagaagggaaatcttagcatgcctccaaaaattcacatccaatgcatagtttgttcaaatttaaggttactcaggcattgatcttttcagtgttttttcactttagctatgtggattagctagaatgcacaccaaaaaaatacttgagctgtatatatatatgtgtgtgtgtgtgtgtgtgtgtgtgtgtgtgtgtgcatgtatgtgcacatgtgtctgtgtggtatatttgtgtatgtgtatttgtatgtactgttattgaaaatatatttaatacctttggaaaaatcttgggcaagatgacctactagttttccttgaaaaaaagttgctttgttattaatattgtgcttaaattatttttatacaccattgttccttacctttacataattgcaatatttcccccttactacttcttggaaaaaaattacaaaatgaagttttatagaaaag

SEQ ID NO: 149 - DNA, 2657 bp, Homo sapiens
tgggaacacaaacttgctggcgggaagagcccggaaagaaacctgtggatctcccttcgagatcatccaaagagaagaaaggtgacctcacattcgtgccccttagcagcactctgcagaaatgcctcctcagctgcaaaacggcctgaacctctcggccaaagttgtccagggaagcctggacagcctgccccaggcagtgagggagtttctcgagaataacgctgagctgtgtcagcctgatcacatccacatctgtgacggctctgaggaggagaatgggcggcttctgggccagatggaggaagagggcatcctcaggcggctgaagaagtatgacaactgctggttggctctcactgaccccagggatgtggccaggatcgaaagcaagacggttatcgtcacccaagagcaaagagacacagtgcccatccccaaaacaggcctcagccagctcggtcgctggatgtcagaggaggattttgagaaagcgttcaatgccaggttcccagggtgcatgaaaggtcgcaccatgtacgtcatcccattcagcatggggccgctgggctcacctctgtcgaagatcggcatcgagctgacggattcgccctacgtggtggccagcatgcggatcatgacgcggatgggcacgcccgtcctggaagcactgggcgatggggagtttgtcaaatgcctccattctgtggggtgccctctgcctttacaaaagcctttggtcaacaactggccctgcaacccggagctgacgctcatcgcccacctgcctgaccgcagagagatcatctcctttggcagtgggtacggcgggaactcgctgctcgggaagaagtgctttgctctcaggatggccagccggctggcagaggaggaagggtggctggcagagcacatgctgattctgggtataaccaaccctgagggtgagaagaagtacctggcggccgcatttcccagcgcctgcgggaagaccaacctggccatgatgaaccccagcctccccgggtggaaggttgagtgcgtcggggatgacattgcctggatgaagtttgacgcacaaggtcatttaagggccatcaacccagaaaatggctttttcggtgtcgctcctgggacttcagtgaagaccaaccccaatgccatcaagaccatccagaagaacacaatctttaccaatgtggccgagaccagcgacgggggcgtttactgggaaggcattgatgagccgctagcttcaggcgtcaccatcacgtcctggaagaataaggagtggagctcagaggatggggaaccttgtgcccaccccaactcgaggttctgcacccctgccagccagtgccccatcattgatgctgcctgggagtctccggaaggtgttcccattgaaggcattatctttggaggccgtagacctgctggtgtccctctagtctatgaagctctcagctggcaacatggagtctttgtgggggcggccatgagatcagaggccacagcggctgcagaacataaaggcaaaatcatcatgcatgacccctttgccatgcggcccttctttggctacaacttcggcaaatacctggcccactggcttagcatggcccagcacccagcagccaaactgcccaagatcttccatgtcaactggttccggaaggacaaggaaggcaaattcctctggccaggctttggagagaactccagggtgctggagtggatgttcaaccggatcgatggaaaagccagcaccaacgtcacgcccataggctacatccccaaggaggatgccctgaacctgaaaggcctggggcacatcaacatgatggagcttttcagcatctccaaggaattctgggacaaggaggtggaagacatcgagaagtatctggtggatcaagtcaatgccgacctcccctgtgaaatcgagagagagatccttgccttgaagcaaagaataagccagatgtaatcagggcctgagaataagccagatgtaatcagggcctgagtgctttacctttaaaatcattaaattaaaatccataaggtgcagtaggagcaagagagggcaagtgttcccaaattgacgccacctaataatcatcaccacaccgggagcagatctgaaggcacactttgatttttttaaggataagaaccacagaacactgggtagtagctaatgaaattgagaagggaaatcttagcatgcctccaaaaattcacatccaatgcatactttgttcaaatttaaggttactcaggcattgatcttttcagtgttttttcacttagctatgtggattagctagaatgcacaccaaaaagatacttgagctgtatatatatatgtgtgtgtgtgtgtgtgtgtgtgtgtgtgtgcatgtatgtgcacatgtgtctgtgtgatatttggtatgtgtatttgtatgtactgttattcaaaatatatttaatacctttggaaaatcttgggcaagatgacctactagttttccttgaaaaaaagttgctttgttattaatattgtgcttaaattatttttatacaccattgttccttacctttacataattgcaatatttcccccttactacttcttggaaaaaaattagaaaatgaagtttatagaaaag

SEQ ID NO: 150 - DNA, 1498 bp, Homo sapiens
ctctgacctagcagtcaacatgaaggctctcattgttctggggcttgtcctcctttctgttacggtccagggcaaggtctttgaaaggtgtgagttggccagaactctgaaaagattgggaatggatggctacaggggaatcagcctagcaaactggatgtgtttggccaaatgggagagtggttacaacacacgagctacaaactacaatgctggagacagaagcactgattatgggatatttcagatcaatagccgctactggtgtaatgatggcaaaaccccaggagcagttaatgcctgtcatttatcctgcagtgctttgctgcaagataacatcgctgatgctgtagcttgtgcaaagagggttgtccgtgatccacaaggcattagagcatgggtggcatggagaaatcgttgtcaaaacagagatgtccgtcagtatgttcaaggttgtggagtgtaactccagaattttccttcttcagctcattttgtctctctcacattaagggagtaggaattaagtgaaaggtcacactaccattatttccccttcaaacaaataatatttttacagaagcaggagcaaaatatggcctttcttctaagagatataatgttcactaatgtggttattttatattaagcctacaacatttttcagtttgcaaatagaactaatactggtgaaaatttacctaaaaccttggttatcaaatacatctccagtacattccgttctttttttttttgagacagtctcgctctgtcgcccaggctggagtgcagtggcgcaatctcggctcactgcaacctccacctcccgggttcacgccattctcctgcctcagcctcccgagtagctgggattacgggcgcccgccaccacgcccggctaattttttgtatttttagtagagacagggtttcaccgtgttagccaggatggtctcgatctcctgaccttgtgatccacccacctcggcctcccaaagtgctgggattacaggcgtgagccactgcgcccggccacattcagttcttatcaaagaaataacccagacttaatcttgaatgatacgattatgcccaatattaagtaaaaaatataagaaaaggttatcttaaatagatcttaggcaaaataccagctgatgaaggcatctgatgccttcatctgttcagtcatctccaaaaacagtaaaaataaccactttttgttgggcaatatgaaatttttaaaggagtagaataccaaatgatagaaacagactgcctgaattgagaattttgatttcttaaagtgtgtttctttctaaattgctgttccttaatttgattaatttaattcatgtattatgattaaatctgaggcagatgagcttacaagtattgaaataattactaattaatcacaaatgtgaagttatgcatgatgtaaaaaatacaaacattctaattaaaggctttgcaacacaaaaaaaaaaaaaaaaaa

SEQ ID NO: 151 - DNA, 1319 bp, Homo sapiens
cgcgcccgtcccgtcgccgccgccgccgccgcagacccctcggtcttgctatgtcgagctcacccgtgaagcgtcagaggatggagtccgcgctggaccagctcaagcagttcaccaccgtggtggccgacacgggcgacttccacgccatcgacgagtacaagccccaggatgctaccaccaacccgtccctgatcctggccgcagcacagatgcccgcttaccaggagctggtggaggaggcgattgcctatggccggaagctgggcgggtcacaagaggaccagattaaaaatgctattgataaactttttgtgttgtttggagcagaaatactaaagaagattccgggccgagtatccacagaagtagacgcaaggctctcctttgataaagatgcgatggtggccagagccaggcggctcatcgagctctacaaggaagctgggatcagcaaggaccgaattcttataaagctgtcatcaacctgggaaggaattcaggctggaaaggagctcgaggagcagcacggcatccactgcaacatgacgttactcttctccttcgcccaggctgtggcctgtgccgaggcgggtgtgaccctcatctccccatttgttgggcgcatccttgattggcatgtggcaaacaccgacaagaaatcctatgagcccctggaagaccctggggtaaagagtgtcactaaaatctacaactactacaagaagtttagctacaaaaccattgtcatgggcgcctccttccgcaacacgggcgagatcaaagcactggccggctgtgacttcctcaccatctcacccaagctcctgggagagctgctgcaggacaacgccaagctggtgcctgtgctctcagccaaggcggcccaagccagtgacctggaaaaaatccacctggatgagaagtctttccgttggttgcacaacgaggaccagatggctgtggagaagctctctgacgggatccgcaagtttgccgctgatgcagtgaagctggagcggatgctgacagaacgaatgttcaatgcagagaatggaaagtagcgcatccctgaggctggactccagatctgcaccgccggccagctgggatctgactgcacgtggcttctgatgaatcttgcgttttttacaaattggagcagggacagatcatagatttctgattttatgtaaaattttgcctaatacattaaagcagtcacttttcctgtgctgtttcaaaaaaaaaaaaaaaaaaaaaaaaaaaaaaaaaaaaaaaaaaaaaaaaaaaaaaaaaaaaaaaaaaaaaaaaaaaaa

SEQ ID NO: 152 - DNA, 556 bp, Homo sapiens
acaactcggtggtggccactgcgcagaccagacttcgctcgtactcgtgcgcctcgcttcgcttttcctccgcaaccatgtctgacaaacccgatatggctgagatcgagaaattcgataagtcgaaactgaagaagacagagacgcaagagaaaaatccactgccttccaaagaaacgattgaacaggagaagcaagcaggcgaatcgtaatgaggcgtgcgccgccaatatgcactgtacattccacaagcattgccttcttattttacttcttttagctgtttaactttgtaagatgcaaagaggttggatcaagtttaaatgactgtgctgcccctttcacatcaaagaactactgacaacgaaggccgcgctgcctttcccatctgtctatctatctggctggcagggaaggaaagaacttgcatgttggtgaaggaagaagtggggtggaagaagtggggtgggacgacagtgaaatctagagtaaaaccaagctggcccaagtgtcctgcaggctgtaatgcagtttaatcagagtgccattttttttt

SEQ ID NO: 153 - DNA, 332 bp, Homo sapiens
atggaccccaactgctcgtgcgccactgggggctcctgctcctgtgccagctcctgcaagtgcaaagagtgcaaatgtacctcctgcaagaagagctgctgctcctgctgccccatgggctgtgccaagtgtgcccagggctgcgtctgcaaaggggcgtcggagaagtgcagctgctgtgcctgatgtggggacagacctgctcccagatgtaaacagagcaacctgcacaaacctggatttttttttctacaaccctgagcatttgctacatacttttttctatcaaatatgtaaacgccataaacagttttgcttgttcgggcctcctt

SEQ ID NO: 154 - DNA, 12857 bp, Homo sapiens
gatttcactattactagaatcaataataccaaccctaggggtaaaaataaagataaatgtgtgcaaatcctgcctgcagtctcgggcacgtcgtgggtgtccaagaactgttcttaggcagccggtggggacaaagtctgtgtgcctcctgtcctggaataggtcccaaggtcggcttacttgcaaagcaagggtacggcgcaagagtactgaatacgggttggaagggcgctggctctaccctcagctcataggccggctgggcgcggctgaccagcagctaggccccgtcttccctaggaacggccacgggggcctgggagggtatgaatgtctttttgcagtgaggcctctggaccccgcggccccccggcagcgcaaccaaaactcaggggcaggcgccgcagccgcctagtgcagccagatccccgccggcaccctcaggggcggacgggaggcagggccttcgggcgtaccaactccaagggggcaggggccgcctcccttcggccgcgcgccactcaagtacggcagacaggcagcgaggttgccgaggccgaggctagcctgcagcctcctttctcccgtgccctgggcgcggggtgtacggcaagcgcgggcgggcgggacaggcacgcagggcacccccggggttgggcgcggcgggcgcggggcggggcccgcgggggggggggcggggcggcggtgcccttgcggcgcagctggggtcgcggccctgctccccgcgctttcttaaggcccgcgggcggcgcaggagcggcactcgtggctgtggtggcttcggcagcggcttcagcagatcggcggcatcagcggtagcaccagcactagcagcatgttgagccgggcagtgtgcgggtgagaagaaaggggacccggtcacgcgcccaagggcgaaggggctcgcggcgggcagggcctccgcggcaatggcgacagtggccgcaccgggcctggcgggaccggggcacctgcaggcggttctcccgggagtgcccggcgcggcggctggagcggggatccgcagggaggggacgcggggactcgggggacgccgcgcctgccgttcctcggcagcccagcctgcgtagacggtcccgcggcgctgactgaccgggctgtgctttctcgtcttcagcaccagcaggcagctggctccggctttggggtatctgggctccaggcagaagcacagcctccccgacctgccctacgactacggcgccctggaacctcacatcaacgcgcagatcatgcagctgcaccacagcaagcaccacgcggcctacgtgaacaacctgaacgtcaccgaggagaagtaccaggaggcgttggccaagggtaggttccaggctgagcggcgggaggcagtccccggcagaggcgaccccagggagccaggccccatacggacgggcctctccgtggaggagaactcgcttcgtatttgtaccggttccgagttttccaggcacgatagtctctcttttaaacacatggtctacctcattgtagaaggagtgcctcgatgggtttgaacacacttctgtcatctcagggaacttggggtcctgcgaaggagcttgccttactgttgtgagccacattccgttacacatattgccagcactggtgaattgtagggcctgaaaagaaagctctactgtgtcactcgttttttttgcaaattgaaattgttcttgttgtataatatgctttggggaaatgtttggtctctcaggtaggtgtgccagccgtttgcaggagggctgagagcgcctgtccactggtggccagacatcatcgggtccgcaggtgtctctgagtgtcagggtcacctcctgatagaagtgggagtggtgtcttactgccaggtcacactgaaggtgggagacaggaggacactactccgtgctaggaaccatggtccttgtcatcttcctgagagcaaacggggtcgggactccagcctaggacttggagactccctgcatccccagctaccctgcaggtgaaacttcactgagcccacttgacttcaggtgggagaggaggaggcacaccgttgtggtgtcgttaccaaaaaagcagtaacctaactgtggaacagttcaggatctttagacttgatacttttcttgatttcccttaggggtcaaagttcacaaggaaaatagccctttagtgggaaactgaaacaggcttgtttttatttactatttactcatatttgtaatgcaattaaatatatgttgttacttttttttttctcaagagctcggttgataaaaccaggggatgtggacttttgagtcttggcctttggggtgtgtatggaatgtatgttttaacattttttacaaaatagtattgtctttttaatttattcgttagtggtttgcacaaggaagataatcgatagtcatgttttttagacgctctgtattgcttggtaagctacgtagtaaaaaatgtttacttttccttaaatgttttgaatttcggggttatgaaatttgttgagtaatttttagacagtcacatcttgttgactggaggcatctagtggaaaaatgcagtatttcagcctgattgtgtttgaagtaaatgattaaaagaggaggaagttaccacattctggaagatttacttgagacagacgaaccttgaattacgggaaaaggccccgtgatttaggaaataacaaatttgggaaacatgtaatggggagagactggggaataccccagttgtgaaagtacttcctgtaaggcaacatctgacaccaggaacctttctcttcagtattttaaaaacaacttaatttcagtcctttacttgtggaatcagagccttacttatgtaatacaacccactggaaaaaagctttttattgtattgtactatattgtttataagtgattgagtacctgcagagctttcttttacttaaacatattttaaaaattattaaaaagattttcatgtttgaaaacttggggaaaaaagataaaacaatgtcataatctcatcacatttaactgactaatatgaatatttttcaacaaaaagcatttgacttttattattatttgaggcaaaaactaaactgaaaccaaataaaatgttgaatttcagaaaagtgttcttaaaagcagatattaagccctcaatttttattaattttaaaatgagtaagcaaactgtaagatgttaagattattaaattatctctcattaagcatgtatctttcccattttaaaaattcagttactattgatttattaaaaaacaatagaaaagttacatctatttttagagtgactctcaagaaaatttaataagggaaacacagatctataaaaaaactgtttgtaaacctaacaaaggaaaaaaaaagttggtgtctttaaaaaaccctttgagattagctgtgtattcagatatcagttggttctctcctttctgaatcgctaaacaactggagcttgtttcagaaagcagcattgtctacgtatgttccttttaaaaattttttttttaattctatctaaaaaaaacagacggggtcacactatgttgcccaggctgctcttgaattcctgggctcccctatccacgcacctcggccttccagagtgctgggattacaggtgtgagccaccgtgcctagtcagacatacttttttttttttttttttttttgacggaatctcagtctgtcccgcaggttggagtgcagtgatgtgatctcggctcactacaacctccgtctcctgggttcaagtaattctcctgcctcagcctcctgagtagctgggattacaggcgtacgcaccacgcctggctactttttgtgggttttttagtagagacagggtttttccatgtcgtccaggctggtctggaactcctgacctcaagtgatccgcccatctcggcctcctaaagtgctgggattacaggcgtgagccacctcacctggccttgtatgtatgtttttttctttttctttctttttttttttctgtgacggagtattgccctgtcgcccaggctggactgcagtggcgtgttcttggttcactgcaacctctgcctcctgggttcaagccattctcctgcctcatgctcctgagtagctgggattataggcacgcgccaccatacctggctaatttctgtatttttagtgaagacagggtttcaccatgttggccaggccggtcttgaaatcctgacctgaagagagctgcccgcctcggcttcccaaagtgctgagattacaggcgtgagccaccgcacccggcccagacatatgttcttaacgtacactttcagaacagcagttgagaactttttccaaaatgtaagctccttgagagcaaagctctcagtgggtctctgtgtcctttactttgcttctcttggtatcttgtggataatatgcacaaaatatttattaaacaagaggatttccatttttttctaatattaatagttcatttagtctgtagcttcttgaaggcatagaaaagactattttattttgcctacttatttggcgaggtacccatgcagtatgccaggagttacagggcctattgagaaggagtaaagggtctgggaggggtggcagggagttgctaattcatgtatggtggctagagaaggcttcactgatggggttgatgtttcagtggagacttgaaggaggaacaggaacgcagcatgagactgtcttggggaagagtgttcagcagaggcagcagtgctcagctagccttgaggggaacatccaagttggtcatgtgagtgcaaaaaggccagtgaggctgcagctgcgtgagcacgtgctcaatgacggggtcaagtgcagcgcctcttggtagtaagagtagctgagtgtaaacacctagggttcgctccagtgagaaggggagcctttggagggggcaaggcccacccccaccccccaaaactgaggggatagtggcaccagtgcagtgagaaatactggtcctctgtcccaatgaggtggcagtagagttagggagaagggattaggttctgcttgtgttttatttttttcttttatttttctctgtgtgcttttatatagattggatgtattttaaaggtagagctggctttgctaatggatatgctggtggattggatgtggggtgaagggagaggagtcaaaaatgacatcaggttcccaaggatgtcctgagggacagagctggcatttactgagacgtggaggacaataggaggagtaagtttggggtagaacatcaggagttcaattttgagtatgttgagtttcttgttaatgtgacttggagatatttcccaatgaatcgtcgtctgtcttgaaagtgagagttgaaggttttctgtacagtctgtatgttgagccatacattttagcattctattattttgattgtcctctttggtgtttcctaaaatctcttctatctaagagatccctgagcctagcagccaggagtgaattttctagcttttccacctctgctaggtccttcatcagttgttcagcatgtctgggacaaataattttggggcgggggggtgctgaattttaggacaaacggatgttatagataagctggtcccattatctaatagcttacaaagaaaaaaatataatgtatacagtggttgaaaaagtaggagttacaaaaaaatgtgttgcatttacttcaggagatgttacagcccagatagctcttcagcctgcactgaagttcaatggtggtggtcatatcaatcatagcattttctggacaaacctcagccctaacggtggtggagaacccaaaggttggtatatattggtgcacccttatctacattttgtgcacagtaggaatcgattgttgatttactgaagttaccttatacttgttttttgttttttttgttgttgattttttgagacaagagttttgctcttgttgcccaggctggagtacagtggcgcagtcttggctcactgcaacctccgcttcctgggttcaagtgattctcctgcctcagcctccaagtagctgggattacaggcgcccgccaccacgcctggctaatttttgcatttttagtagagatgaggtttcattcaccatgttggccaggctggtcttgaactcctgacctcatgatctgcccaccttggcctcccaaagtgctgggattacaggcatgagccaccgtgcctggcctaagttaccttattcttaccagaggtatcatagtggcatatttttcataacaacgagtatgataaaagttgtaactttcaaaaggacacaagtaggaatggagaatgctttcatggggttatgtcataagattttatgttcacgccaacatagaatatcacatcaactccaccttctggtttctggatggtacttcatattagggaaagactgagagacttcattttatgaacttttttttttttgagacggagtcttacagtcgcccaggctggagcgcagtggtgcaatgtcggctcattgcaacctccgcctttcaggttcatgcaattctcgtgtctcagccacccaagtagctgggattacaggcatgtggcatcactcccggctaatttttatatttttggtagagacagggtttcaccatgttggcggggctggtctcgaactcctggcctcaagtgatccacccaccttggcctcccaaagtgctgtggtatggatgtgagccaccgcgccagtctagaaaagatgaactttctgtctactagtttctagggcctggattagatagttaaccgtctgtaccttttttcatctatgtgatacagggataacaatggtgttgttttgagaattaaattatagtgtcatttgctatttttcactctttcctaactgataaaaagtcagttgttccaggaaattaggttttctgggtatttttaaaaagtgttcagggaatgaggagagtacagggctagatggtcttgttcgctatcactgtttccttgacttcctgtgtagcttgtggaggcccagatgactttaattatcttcttcacccagggagggcatgaggcgtaaatgtagttcttgtctcttgtttctgggctccggatatgcaccctaagtttctgtggttttattgttcatttttaatcagtgttatggaaggcagcctatcttatgcacttgaaataagcaatttcattttaaggtaatgatgaatgaggagagtaagcttggaaactggcaactttttctttatttttgtttttatttattattattttggagatggagtttagctctttcgcccaggctacagtgaagtggcttgatcttggctcactgcagcctctgccatcccgggttcaagtgattctctgcctcagcctcccgagtagctgggattataggtgcctgccaccatgcccggctaatttttttgtatttttagtagagaggagtttctccatgttggtcaggctggttttgaactcctgacctcaggtgatccacctgtcttggcctcccaaagtactaagattacaggtgtgagccaccgtgcctggccaacttattttttttctgagttcagtcttctagactatcggttaatacttttgaagttttgtcagttaccagaatatcagatatattcatatgcaaccagtggttttggtatgctgccatttttgtctaatctgtaccacattccatcatttgtgcttataaagatgattacttttaaacccgtagaataagagaagtgagattttgacccagttgatttagttgatgtgactaatctagaattatattctgtattactacagaataaaaggattacagctcttaaagtatacccttagttcagtcgtagagaaaactgcccatcaagacaggaagagctgggctgccttggagaagaacaatgactttattcccaaatggaggcgtagaagaaggagggtagaagtcaaaggaaaattttctattcagggaaaagaaaaagctaacagaaagtagtatttctttcctaacaaagatagtacagtgagtggggaaatccctctaacacgattcattaaaaaatgtgaactacgcagctggaggccattatcctaagcgaattaacccaggaacagaaaaccaaataccacatgtctcacttgcaagtggaagctaaacatggagtacttatggatataaaaatggcagcaacagacactgaggacagagcagggagggagaaagaaggggggggtgaaaactgttgtatactaagctcgctacctgggtgatggcatcaattgcaccccagacctcagcatcatatgatacccgtgtaacaaacctgtgcgtgtaccctctgaatttaaaataaaatttgaaccgggcacggtggctcacgcctgtattcccagcactttgggaggccaaggcgggtggatcacctgaggttgggagtttgagaccagcctgaccaacatggagaaacccgtctctactaaaaacacaaaattagccgggcgtgatggcacatgcctgtaatcgcagctgctcgggaggctaaggcaggagaattgcttgaacctgggaggcagaggttgcagtgacccgagatcatggcattgcactccagcctgggcaacaagagtgaaactccgtctcaaaaggtaaaaaatgaaaaaaaaaaaaaaaaaaaaaaaaagttgaagttataaaaaacaaaaacgttgaattaaaattgtgaaacttagatccaggtgtcgcattctgatgttgtctaatttcttgggccctatgacaaaaatattttaatacatgtaatataacatgttactgtaattattgaaatctgttcatttgtgggtgtttttggattttttttttaataggggagttgctggaagccatcaaacgtgactttggttcctttgacaagtttaaggagaagctgacggctgcatctgttggtgtccaaggctcaggttggggttggcttggtttcaataaggaacggggacacttacaaattgctgcttgtccaaatcaggatccactgcaaggaacaacaggttagatttaaaaattgtgatttcatttgggagagatgctctactgtaaagcattcaactagaaataaggaaaactaacagtgttttaagaacatgtaataatttgcaaatcttaacagataacacccagagtcttgtgtaagtaaaatgttttagaagtcctgatatttcataaaattaagtacacgtaatttataggtacattaacaacatgttttatttttatttattttttttgagacagatctcactgttgcccaggctggagtgcagtggtgcgatctcggttcactgcaacctccgcctcctgggttcaagtgattctcctgcctcagcctcccaaatagctgggattacaggcacataccaccatgcccagctaatttttgtgtttttagtacagacagggtttcaccatgttggccaggctggtcttgaactcctgacctcaggtatctgcctgcctcggcctcctgaagtgctgggattacaggcatgagccaccatgcccagccaaatgttttacttattaaccctgcttcattctacagagaataatatcagcttagataattatatgtactaaaataaaaaaaaaattagctatagaacaagagtgaggaaaagaaatacaagcagagactgatttcagagcttgtactgttacctcctctgctgagcatttgaggttaaactgggactagatctcaggtttccagaccttctgcctttctggggctctttggtagagtatatgaaaatattcggcttggaagtgccaggctgggctcaccaaatactttgctgttgatcctaattggatttaaaaaatgtcactgaagagtatgggaaatagagccatgagttgtctggcagagggttgggactttgaacttaaagtgataccttcacatcaacaacagtcattctctgccccttcttctacccctgacattggaatactcttgatctgtggctcacttcacaggatagacccagattttggcagaatctgaacagctcttttgggacagtgaaatggcataacaatttgtaaaagccacaaaaaatttgtaagcaccgatctgtagagtcaggttatttgtagagctgcatgaccagaaaggctgatatttgtaagtgagtcccagctacactccttcctctccctgtggaaagcacattagaaggaaaatgagggaatgtcatggccttttgtttataaaaatcattaataaattttgctacttgaaattattaataataaattactagtgacctccctcacaactgatcaagacatactggttaagaattgtttttgtagagagagctataatttattttgagtgtttttgtgtgtgcgtgatggagtctcactctgttgcccaggctggagtgcagtggcgcaatcttggctcactacaacttccgcctcccaggttcaagcaattctcctgcgtcagcttcctgagtagctgggattacaggcgcctgccacctcgccaggctaattttttgtatttttagtagaggcggggtttcaccatgttggccaggctggtctcgaacgcctgacctcaagagatctgcctgcctcggcctcccaaagtgctgggattacaggcctgagccactgcgcccagaccaaaagtttttttaaatggatgttttacagatagaactaaattcttcatttacctcacttaatttctgaaaacactgtgtcctccaactgctctgtattcccaaagattaaaattagccttggggagcagagctggttcctcgtaaacccctgtgagtgcccagaccctttggaggaggttctcagtgggcttttgcctgctcccacagatgtaacccacccttcctgctgctcctaagaccaccatgaggaaggctgggaattggctcttgaattaatttgttggtatttttaagaatagctattaaagtactgttgttaattttcccaagtctattttattgttagtatttgtcacattttctttgtaaacagtgaattaaaaatattttataggaatattcattcttatctagatttcctacttatataaaaaaacaagtgaatgagattgttacaaagggtaattttgtgtgagtagaataataaaagttgaaattgagaagatgcaatgttttagactgaaactgatggttggtttgttttccccttctttctaacaggccttattccactgctggggattgatgtgtgggagcacgcttactaccttcagtataaaaatgtcaggcctgattatctaaaagctatttggaatgtaatcaactgggagaatgtaactgaaagatacatggcttgcaaaaagtaaaccacgatcgttatgctgagtatgttaagctctttatgactgtttttgtagtggtatagagtactgcagaatacagtaagctgctctattgtagcatttcttgatgttgcttagtcacttatttcataaacaacttaatgttctgaataatttcttactaaacattttgttattgggcaagtgattgaaaatagtaaatgctttgtgtgattgaatctgattggacattttcttcagagagctaaattacaattgtcatttataaaaccatcaaaaatattccatccatatactttggggacttgtagggatgcctttctagtcctattctattgcagttatagaaaatctagtcttttgccccagttacttaaaaataaaatattaacactttcccaagggaaacactcggctttctatagaaaattgcactttttgtcgagtaatcctctgcagtgatacttctggtagatgtcacccagtggtttttgttaggtcaaatgttcctgtatagtttttgcaaatagagctgtatactgtttaaatgtagcaggtgaactgaactggggtttgctcacctgcacagtaaaggcaaacttcaacagcaaaactgcaaaaaggtggtttttgcagtaggagaaaggaggatgtttatttgcagggcgccaagcaaggagaattgggcagctcatgcttgagacccaatctccatgatgacctacaagctagagtatttaaaggcagtggtaaatttcaggaaagcagaagttaaaggcaaaattgtaaatcagtcgagatcgggtgccttcagggtggtatggctgtataccaaaattgtaaatcactacatgaagcttatatattggtttggcctgaaaggtgaagtggggtaggcagggggcgggcttacaggttatggtggattcaaagactccctgatttgtgattggttaaggaagcaaagctttgtctaaaaacttggggtccgcagaaaggaacattaaggtctggccaggcccctcaggaagaaactgagagcaaagaatggaggtcagagtttagtccctggtgttcccccttatctgacgtctgtgtgaatccatttggtgggggtctgggtttctgaaaagtagctcaggggcacgtgttaaggatgtctctaggtgactctaacttccctggctattgtttgaaactgttatgaccttcttgcttatcagcttgctggtttccttctcggggcgagctgggtgcctggagttttcggtgaaggaaactcaagattctcctttatttctgtgcttgtgggaatccccctggcacaccccaaagaggggtccctgctccgtctcacagggat

SEQ ID NO: 155 - DNA, 560 bp, Homo sapiens
atggcgacgaaggccgtgtgcgtgctgaagggcgacggcccagtgcagggcatcatcaatttcgagcagaaggaaagtaatggaccagtgaaggtgtggggaagcattaaaggactgactgaaggcctgcatggattccatgttcatgagtttggagataatacggcaggctgtaccagtgcaggtcctcactttaatcctctatccagaaaacacggtgggccaaaggatgaagagaggcatgttggagacttgggcaatgtgactgctgacaaagatggtgtggccgatgtgtctattgaagattctgtgatctcactctcaggagaccattgcatcattggccgcacactggtggtccatgaaaaagcagatgacttgggcaaaggtggaaatgaagaaagtacaaagacaggaaacgctggaagtcgtttggcttgtggtgtaattgggatcgcccaataaacattcccttggatgtagtctgaggccccttaactcatctgttatcctgctagctgtagaaatgtatcctgataaacattaaacactgtaatctt

SEQ ID NO: 156 - DNA, 1026 bp, Homo sapiens
cagcatgttgagccgggcagtgtgcggcaccagcaggcagctgcctccggttttggggtatctgggctccaggcagaagcacagcctccccgacctgccctacgactacggcgccctggaacctcacatcaacgcgcagatcatgcagctgcaccacagcaagcaccacgcggcctacgtgaacaacctgaacgtcaccgaggagaagtaccaggaggcgttggccaagggagatgttacagcccagatagctcttcagcctgcactgaagttcaatggtggtggtcatatcaatcatagcattttctggacaaacctcagccctaacggtggtggagaacccaaaggggagttgctggaagccatcaaactggactttggttcctttgacaagtttaaggagaagctgacggctgcatctgttggtgtccaaggctcaggttggggttggcttggtttcaataaggaacggggacacttacaaattgctgcttgtccaaatcaggatccactgcaaggaacaacaggccttattccactgctggggattgatgtgtgggagcacgcttactaccttcagtataaaaatgtcaggcctgattatctaaaagctatttggaatgtaatcaactgggagaatgtaactgaaagatacatggcttgcaaaaagtaaaccacgatcgttatgctgagtatgttaagctctttatgactgtttttgtagtggtatagagtactgcagaatacagtaagctgctctattgtagcatttcttgatgttgcttagtcacttatttcataaacaacttaatgttctgaataatttcttactaaacattttgttattgggcaagtgattgaaaatagtaaatgctttgtgtgattgaatctgattggacattttcttcagagagctaaattacaattgtcatttataaaaccatcaaaaatattccatccatatactttggggacttgtagggatgcctttctagtcctattctattgcagttatagaaaatctag

SEQ ID NO: 157 - DNA, 1984 bp, Homo sapiens
ggatccagagatttagattttttataagctttcctgccaccgaaacgggtgtttgggacctcacgaggccctgttcattcttcgtcgctgcgctccccactctgtactggatgcatttactgacgttgttgtctccgtccccagagtatgaacccccaaggtgactcatgcagctgtgggtgcccggcatacagcatggtgactggaatggatgagcacccaataaacatttgttgcaggaatgcaggaggacgggcaggccagcaagcaggctgcctggtttttcccacatgggcttttctgggaaagaagagcttctatttttggaaagggctgctatgattgagaaaagttcatggcagcaaaaaaaggacagacgtcgggagggaaacactcctagttctcccagacaacacattttttaaaaagactccttcatctctttaataataacggtaacgacaatgacaatgatgattacttatgagtgcggctagtgccagccactgtgttgtcactgggcgagtaatgatctcattggatcttcacggtgggcgtgcggggctccagggacagcctgcgttcctgggctggctgggtgcagctctcttttcaggagagaaagctctcttggaggagctggaaaggtgcccgactccagccatgctggcgctactgtgttcctgcctgctcctggcagccggtgcctcggacgcctggacgggcgaggactcggcggagcccaactctgactcggcggagtggatccgagacatgtacgccaaggtcacggagatctggcaggaggtcatgcagcggcgggacgacgacggcacgctccacgccgcctgccaggtgcagccgtcggccacgctggacgccgcgcagccccgggtgaccggcgtcgtcctcttccggcagcttgcgccccgcgccaagctcgacgccttcttcgccctggagggcttcccgaccgagccgaacagctccagccgcgccatccacgtgcaccagttcggggacctgagccagggctgcgagtccaccgggccccactacaacccgctggccgtgccgcacccgcagcacccgggcgacttcggcaacttcgcggtccgcgacggcagcctctggaggtaccgcgccggcctggccgcctcgctcgcgggcccgcactccatcgtgggccgggccgtggtcgtccacgctggcgaggacgacctgggccgcggcggcaaccaggccagcgtggagaacgggaacgcgggccggcggctggcctgctgcgtggtgggcgtgtgcgggcccgggctctgggagcgccaggcgcgggagcactcagagcgcaagaagcggcggcgcgagagcgagtgcaaggccgcctgagcgcggcccccacccggcggcggccagggacccccgaggcccccctctgcctttgagcttctcctctgctccaacagacaccttccactctgaggtctcaccttcgcctctgctgaagtctccccgcagccctctccacccagaggtctccctataccgagacccaccatccttccatcctgaggaccgccccaaccctcggagccccccactcagtaggtctgaaggcctccatttgtaccgaaacaccccgctcacgctgacagcctcctaggctccctgaggtacctttccacccagaccctccttccccaccccataagccctgagactcccgcctttgacctgacgatcttcccccttcccgccttcaggttcctcctaggcgctcagaggccgctctggggggttgcctcgagtccccccacccctccccacccaccaccgctcccgcggcaagccagcccgtgcaacggaagccaggccaactgccccgcgtcttcagctgtttcgcatccaccgccaccccactgagagctgctcctttgggggaatgtttggcaacctttgtgttacagattaaaaattcagcaattca

SEQ ID NO: 158 - DNA, 780 bp, Homo sapiens
aggccattggtttggggccagagtgggcgaggcgcggaggtctggcctataaagtagtcgcggagacggggtgctggtttgcgtcgtagtctcctgcaggtctggggtttccgttgcagtcctcggaaccaggacctcggcgtggcctagcgagttatggcgacgaaggccgtgtgcgtgctgaagggcgacggcccagtgcagggcatcatcaatttcgagcagaaggaaagtaatggaccagtgaaggtgtggggaagcattaaaggactgactgaaggcctgcatggattccatgttcatgagtttggagataatacggcaggctgtaccagtgcaggtcctcactttaatcctctatccagaaaacacggtgggccaaaggatgaagagaggcatgttggagacttgggcaatgtgactgctgacaaagatggtgtggccgatgtgtctattgaagattctgtgatctcactctcaggagaccattgcatcattgggcgcacactggtggtccatgaaaaagcagatgacttgggcaaaggtggaaatgaagaaagtacaaagacaggaaacgctggaagtcgtttggcttgtggtgtaattgggatcgcccaataaacattcccttggatgtagtctgaggccccttaactcatctgttatcctgctagctgtagaaatgtatcctgataaacattaaacactgtaatcttaaaagtgtaattgtgtgactttttcagagttgctttaaagtacctgtagtgagaaactgattta

SEQ ID NO: 159 - DNA, 1949 bp, Homo sapiens
catagaagggtccttcccaccctttgccgtccccactcctgtgcctacgacccaggagcgtgtcagccaaatcatggagaatcaagagaaggcgagtatcgcgggccacatgttcgacgtagtcgtgatcggaggtggcatttcaggactatctgctgccaaactcttgactgaatatggcgttagtgttttggttttagaagctcgggacagggttggaggaagaacatatactataaggaatgagcatgttgattacgtagatgttggtggagcttatgtgggaccaacccaaaacagaatcttacgcttgtctaaggagctgggcatagagacttacaaagtgaatgtcagtgagcgtctcgttcaatatgtcaaggggaaaacatatccatttcggggcgcctttccaccagtatggaatcccattgcatatttggattacaataatctgtggaggacaatagataacatggggaaggagattccaactgatgcaccctgggaggctcaacatgctgacaaatgggacaaaatgaccatgaaagagctcattgacaaaatctgctggacaaagactgctaggcggtttgcttatctttttgtgaatatcaatgtgacctctgagcctcacgaagtgtctgccctgtggttcttgtggtatgtgaagcagtgcgggggcaccactcggatattctctgtcaccaatggtggccaggaacggaagtttgtaggtggatctggtcaagtgagcgaacggataatggacctcctcggagaccaagtgaagctgaaccatcctgtcactcacgttgaccagtcaagtgacaacatcatcatagagacgctgaaccatgaacattatgagtgcaaatacgtaattaatgcgatccctccgaccttgactgccaagattcacttcagaccagagcttccagcagagagaaaccagttaattcagcggcttccaatgggagctgtcattaagtgcatgatgtattacaaggaggccttctggaagaagaaggattactgtggctgcatgatcattgaagatgaagatgctccaatttcaataaccttggatgacaccaagcctgatgggtcactgcctgccatcatgggcttcattcttgcccggaaagctgatcgacttgctaagctacataaggaaataaggaagaagaaaatctgtgagctctatgccaaagtgctgggatcccaagaagctttacatccagtgcattatgaagagaagaactggtgtgaggagcagtactctgggggctgctacacggcctacttccctcctgggatcatgactcaatatggaagggtgattcgtcaacccgtgggcaggattttctttgcgggcacagagactgccacaaagtggagcggctacatggaaggggcagttgaggctggagaacgagcagctagggaggtcttaaatggtctcgggaaggtgaccgagaaagatatctgggtacaagaacctgaatcaaaggacgttccagcggtagaaatcacccacaccttctgggaaaggaacctgccctctgtttctggcctgctgaagatcattggattttccacatcagtaactgccctggggtttgtgctgtacaaatacaagctcctgccacggtcttgaagttctgttcttatgctctctgctcactggttttcaataccaccaagaggaaaaatattgacaagtttaaaggctgtgtcattgggccatgtttaagtgtactggatttaactacctttggcttaattccaatcattgttaaagtaaaaacaattcaaagaatcacctaattaatttcagtagatcaagctccatcttatttgtcagtgtagatcactcatgttaattgatagaataaagccttgtgatcatttctgaaattcacaagtaacgtgtatgtgctcatcagaac

SEQ ID NO: 160 - DNA, 1951 bp, Homo sapiens
  misc_feature (379)..(584): n is a, c, g, or t
atagaagggtccttcccaccctttgccgtccccactcctgtgcctacgacccaggagcgtgtcagccaaagcatggagaatcaagagaaggcgagtatcgcgggccacatgttcgacgtagtcgtgatcggaggtggcatttcaggactatctgctgccaaactcttgactgaatatggcgttagtgttttggttttagaagctcgggacagggttggaggaagaacatatactataaggaatgagcatgttgattacgtagatgttggtggagcttatgtgggaccaacccaaaacagaatcttacgcttgtctaaggagctgggcatagagacttacaaagtgaatgtcagtgagcgtctcgttcaatatgtcaagnnnnnnnnnnnnnnnnnnnnnnnnnnnnnnnnnnnnnnnnnnnnnnnnnnnnnnnnnnnnnnnnnnnnnnnnnnnnnnnnnnnnnnnnnnnnnnnnnnnnnnnnnnnnnnnnnnnnnnnnnnnnnnnnnnnnnnnnnnnnnnnnnnnnnnnnnnnnnnnnnnnnnnnnnnnnnnnnnnnnnnnnnnnnnnnnnnnnnnnnnnnnnngcggtttgcttatctttttgtgaatatcaatgtgacctctgagcctcacgaagtgtctgccctgtggttcttgtggtatgtgaagcagtgcgggggcaccactcggatattctctgtcaccaatggtggccaggaacggaagtttgtaggtggatctggtcaagtgagcgaacggataatggacctcctcggagaccaagtgaagctgaaccatcctgtcactcacgttgaccagtcaagtgacaacatcatcatagagacgctgaaccatgaacattatgagtgcaaatacgtaattaatgcgatccctccgaccttgactgccaagattcacttcagaccagagcttccagcagagagaaaccagttaattcagcggcttccaatgggagctgtcattaagtgcatgatgtattacaaggaggccttctggaagaagaaggattactgtggctgcatgatcattgaagatgaagatgctccaatttcaataaccttggatgacaccaagccagatgggtcactgcctgccatcatgggcttcattcttgcccggaaagctgatcgacttgctaagctacataaggaaataaggaagaagaaaatctgtgagctctatgccaaagtgctgggatcccaagaagctttacatccagtgcattatgaagagaagaactggtgtgaggagcagtactctgggggctgctacacggcctacttccctcctgggatcatgactcaatatggaagggtgattcgtcaacccgtgggcaggattttctttgcgggcacagagactgccacaaagtggagcggctacatggaaggggcagttgaggctggagaacgagcagctagggaggtcttaaatggtctcgggaaggtgaccgagaaagatatctgggtacaagaacctgaatcaaaggacgttccagcggtagaaatcacccacaccttctgggaaaggaacctgccctctgtttctggcctgctgaagatcattggattttccacatcagtaactgccctggggtttgtgctgtacaaatacaagctcctgccacggtcttgaagttctgttcttatgctctctgctcactggttttcaataccaccaagaggaaaatattgacaagtttaaaggctgtgtcattgggccatgtttaagtgtactggatttaactacctttggcttaattccaatcattgttaaagtaaaaacaattcaaagaatcacctaattaatttcagtaagatcaagctccatcttatttgtcagtgtagatcaactcatgttaattgatagaataaagccttgtgatcactttctgaaattcacaaagttaaacgtgatgtgctcatcagaa

SEQ ID NO: 161 - DNA, 8460 bp, Homo sapiens
  misc_feature (8148)..(8148): n is a, c, g, or t
cggccgtcgacacggcagcggccccggcctccctctccgccgcgcttcagcctcccgctccgccgcgctccagcctcgctctccgccgcccgcaccgccgcccgcgccctcaccagagcagccatggaggaggtggtgattgccggcatgtccgggaagctgccagagtcggagaacttgcaggagttctgggacaacctcatcggcggtgtggacatggtcacggacgatgaccgtcgctggaaggcggggctctacggcctgccccggcggtccggcaagctgaaggacctgtctaggtttgatgcctccttcttcggagtccaccccaagcaggcacacacgatggaccctcagctgcggctgctgctggaagtcacctatgaagccatcgtggacggaggcatcaacccagattcactccgaggaacacacactggcgtctgggtgggcgtgagcggctctgagacctcggaggccctgagccgagaccccgagacactcgtgggctacagcatggtgggctgccagcgagcgatgatggccaaccggctctccttcttcttcgacttcagagggcccagcatcgcactggacacagcctgctcctccagcctgatggccctgcagaacgcctaccaggccatccacagcgggcagtgccctgccgccatcgtggggggcatcaatgtcctgctgaagcccaacacctccgtgcagttcttgaggctggggatgctcagccccgagggcacctgcaaggccttcgacacagcggggaatgggtactgccgctcggagggtgtggtggccgtcctgctgaccaagaagtccctggcccggcgggtgtacgccaccatcctgaacgccggcaccaatacagatggcttcaaggagcaaggcgtgaccttcccctcaggggatatccaggagcagctcatccgctcgttgtaccagtcggccggagtggcccctgagtcatttgaatacatcgaagcccacggcacaggcaccaaggtgggcgacccccaggagctgaatggcatcacccgagccctgtgcgccacccgccaggagccgctgctcatcggctccaccaagtccaacatggggcacccggagccagcctcggggctggcagccctggccaaggtgctgctgtccctggagcacgggctctgggcccccaacctgcacttccatagccccaaccctgagatcccagcgctgttggatgggcggctgcaggtggtggaccagcccctgcccgtccgtggcggcaacgtgggcatcaactcctttggcttcgggggctccaacgtgcacatcatcctgaggcccaacacgcagccgccccccgcacccgccccacatgccaccctgccccgtctgctgcgggccagcggacgcacccctgaggccgtgcagaagctgctggagcagggcctccggcacagccaggacctggctttcctgagcatgctgaacgacatcgcgctgtccccgaccaccgccatgcccttccgtggctacgctgtgctgggtggtgagcgcggtggcccagaggtgcagcaggtgcccgctggcgagcgcccgctctggttcatctgctctgggatgggcacacagtggcgcgggatggggctgagcctcatgcgcctggaccgcttccgagattccatcctacgctccgatgaggctgtgaaccgattcggcctgaaggtgtcacagctgctgctgagcacagacgagagcacctttgatgacatcgtccattcgtttgtgagcctgactgccatccagataggcctcatagacctgctgagctgcatggggctgaggccagatggcatcgtcggccactccctgggggaggtggcctgtggctacgccgacggctgcctgtcccaggaggaggccgtcctcgctgcctactggaggggacagtgcatcaaagaagcccatctcccgccgggcgccatggcagccgtgggcttgtcctgggaggagtgtaaacagcgctgccccccggcggtggtgcccgcctgccacaactccaaggacacagtcaccatctcgggacctcaggccccggtgtttgagttcgtggagcagctgaggaaggagggtgtgtttgccaaggaggtgcggaccggcggtatggccttccactcctacttcatggaggccatcgcacccccactgctgcaggagctcaagaaggtgatccgggagccgaagccacgttcagcccgctggctcagcacctctatccccgaggcccagtggcacagcagcctggcacgcacgtcctccgccgagtacaatgtcaacaacctggtgagccctgtgctgttccaggaggccctgtggcacgtgcctgagcacgcggtggtgctggagatcgcgccccacgccctgctgcaggctgtcctgaagcgtggcctgaagccgagctgcaccatcatccccctgatgaagaaggatcacagggacaacctggagttcttcctggccggcatccggaggctgcacctctcaggcatcgacgccaaccccaatgccttgttcccacctgtggagttcccagctccccgaggaactcccctcatctccccactcatcaagtgggaccacagcctggcctgggacgtgccggccgccgaggacttccccaacggttcaggttccccctcagccgccatctacaacatcgacaccagctccgagtctcctgaccactacctggtggaccacaccctcgacggtcgcgtcctcttccccgccactggctacctgagcatagtgtggaagacgctggcccgacccctgggcctgggcgtcgagcagctgcctgtggtgtttgaggatgtggtgctgcaccaggccaccatcctgcccaagactgggacagtgtccctggaggtacggctcctggaggcctcccgtgccttcgaggtgtcagagaacggcaacctggtagtgagtgggaaggtgtaccagtgggatgaccctgaccccaggctcttcgaccacccggaaagccccacccccaaccccacggagcccctcttcctggcccaggctgaagtttacaaggagctgcgtctgcgtggctacgactacggccctcatttccagggcatcctggaggccagcctggaaggtgactcggggaggctgctgtggaaggataactgggtgagcttcatggacaccatgctgcagatgtccatcctgggctcggccaagcacggcctgtacctgcccacccgtgtcaccgccatccacatcgaccctgccacccacaggcagaagctgtacacactgcaggacaaggcccaagtggctgacgtggtggtgagcaggtggctgagggtcacagtggccggaggcgtccacatctccgggctccacactgagtcggccccgcggcggcagcaggagcagcaggtgcccatcctggagaagttttgcttcacttcccacacggaggaggggtgcctgtctgagcgcgctgccctgcaggaggagctgcaactgtgcaaggggctggtgcaggcactgcagaccaaggtgacccagcaggggctgaagatggtggtgcccggactggatggggcccagatcccccgggacccctcacagcaggaactgccccggctgttgtcggctgcctgcaggcttcagctcaacgggaacctgcagctggagctggcgcaggtgctggcccaggagaggcccaagctgccagaggaccctctgctcagcggcctcctggactccccggcactcaaggcctgcctggacactgccgtggagaacatgcccagcctgaagatgaaggtggtggaggtgctggccggccacggtcacctgtattcccgcatcccaggcctgctcagcccccatcccctgctgcagctgagctacacggccaccgaccgccacccccaggccctggaggctgcccaggccgagctgcagcagcacgacgttgcccagggccagtgggatcccgcagaccctgcccccagcgccctgggcagcgccgacctcctggtgtgcaactgtgctgtggctgccctcggggacccggcctcagctctcagcaacatggtggctgccctgagagaagggggctttctgctcctgcacacactgctccgggggcacccctcgggacatgtggccttcctcacctccactgagccgcagtatggccagggcatcctgagccaggacgcgtgggagagcctcttctccagggtgtccgtgcgcctggtgggcctgaagaagtccttctacggctccacgctcttcctgtgccgccggcccaccccgcaggacagccccatcttcctgccggtggacgataccagcttccgctgggtggagtctctgaagggcatcctggctgacgaagactcttcccggcctgtgtggctgaaggccatcaactgtgccacctcgggcgtggtgggcttggtgaactgtctccgccgagagcccggcggaacgctccggtgtgtgctgctctccaacctcagcagcacctcccacgtcccggaggtggacccgggctccgcagaactgcagaaggtgttgcagggagacctggtgatgaacgtctaccgcgacggggcctggggggctttccgccacttcctgctggaggaggacaagcctgaggagccgacggcacatgcctttgtgagcaccctcacccggggggacctgtcctccatccgctgggtctgctcctcgctgcgccatgcccagcccacctgccctggcgcccagctctgcacggtctactacgcctccctcaacttccgcgacatcatgctggccactggcaagctgtcccctgatgccatcccagggaagtggacctcccaggacagcctgctaggtatggagttctcgggccgagacgccagcggcaagcgtgtgatgggactggtgcctgccaagggcctggccacctctgtcctgctgtcaccggacttcctctgggatgtgccttccaactggacgctggaggaggcggcctcggtgcctgtcgtctacagcacggcctactacgcgctggtggtgcgtgggcgggtgcgccccggggagacgctgctcatccactcgggctcgggcggcgtgggccaggccgccatcgccatcgccctcagtctgggctgccgcgtcttcaccaccgtggggtcggctgagaagcgggcgtacctccaggccaggttcccccagctcgacagcaccagcttcgccaactcccgggacacatccttcgagcagcatgtgctgtggcacacgggcgggaagggcgttgacctggtcttgaactccttggcggaagagaagctgcaggccagcgtgaggtgcttggctacgcacggtcgcttcctggaaattggcaaattcgacctttctcagaaccacccgctcggcatggctatcttcctgaagaacgtgacattccacggggtcctactggatgcgttcttcaacgagagcagtgctgactggcgggaggtgtgggcgcttgtgcaggccggcatccgggatggggtggtacggcccctcaagtgcacggtgttccatggggcccaggtggaggacgccttccgctacatggcccaagggaagcacattggcaaagtcgtcgtgcaggtgcttgcggaggagccggaggcagtgctgaagggggccaaacccaagctgatgtcggccatctccaagaccttctgcccggcccacaagagctacatcatcgctggtggtctgggtggcttcggcctggagttggcgcagtggctgatacagcgtggggtgcagaagctcgtgttgacttctcgctccgggatccggacaggctaccaggccaagcaggtccgccggtggagggcccagggcgtacaggtgcaggtgtccaccagcaacatcagctcactggagggggcccggggcctcattgccgaggcggcgcagcttgggcccgtgggcggcgtcttcaacctggccgtggtcttgagagatggcttgctggagaaccagaccccagagttcttccaggacgtctgcaagcccaagtacagcggcaccctgaacctggacagggtgacccgagaggcgtgccctgagctggactactttgtggtcttctcctctgtgagctgcgggcgtggcaatgcgggacagagcaactacggctttgccaattccgccatggagcgtatctgtgagaaacgccggcacgaaggcctcccaggcctggccgtgcagtggggcgccatcggcgacgtgggcattttggtggagacgatgagcaccaacgacacgatcgtcagtggcacgctgccccaggccatggcgtcctgcctggaggtgctggacctcttcctgaaccagccccacatggtcctgagcagctttgtgctggctgagaaggctgcggcctatagggacagggacagccagcgggacctggtggaggccgtggcacacatcctgggcatccgcgacttggctgctgtcaacctggacagctcactggcggacctgggcctggactcgctcatgagcgtggaggtgcgccagacgctggagcgtgagctcaacctggtgctgtccgtgcgcgaggtgcggcaactcacgctccggaaactgcaggagctgtcctcaaaggcggatgaggccagcgagctggcatgccccacgcccaaggaggatggtctggcccagcagcagactcagctgaacctgcgctccctgctggtgaacccggagggccccaccctgatgcggctcaactccgtgcagagctcggagcggcccctgttcctggtgcacccaatcgagggctccaccaccgtgttccacagcctggcctcccggctcagcatccccacctatggcctgcagtgcacccgagctgcgccccttgacagcatccacagcctggctgcctactacatcgactgcatcaggcaggtgcagcccgagggcccctaccgcgtggccggctactcctacggggcctgcgtggcctttgaaatgtgctcccagctgcaggcccagcagagcccagcccccacccacaacagcctcttcctgttcgacggctcgcccacctacgtactggcctacacccagagctaccgggcaaagctgaccccaggctgtgaggctgaggctgagacggaggccatatgcttcttcgtgcagcagttcacggacatggagcacaacagggtgctggaggcgctgctgccgctgaagggcctagaggagcgtgtggcagccgccgtggacctgatcatcaagagccaccagggcctggaccgccaggagctgagctttgcggcccggtccttctactacaagctcggtgccgctgagcagtacacacccaaggccaagtaccatggcaacgtgatgctactgcgcgccaagacgggtggcgcctacggcgaggacctgggcgcggattacaacctctcccaggtatgcgacgggaaagtatccgtccacgtcatcgagggtgaccaccgcacgctgctggagggcagcggcctggagtccatcatcagcatcatccacagctccctggctgagccacgcgtgagcgtgcgggagggctaggcccgtgcccccgcctgccaccggaggtcactccaccatccccaccccaccccaccccacccccgccatgcaacgggattgaagggtcctgccggtgggaccctgtccggcccagtgccactgccccccgaggctgctagatgtaggtgttaggcatgtcccacccacccgccgcctcccacggcacctcggggacaccagagctgccgacttggagactcctggtctgtgaagagccggtggtgcccgttcccgcaggaactgggctgggcctcgtgcgcccgtggggtctgcgcttggtctttctgtgcttggatttgcatatttattgcattgctggtagagacccccaggcctgtccaccctgccaagactcctcaggcagcgtgtgggtcccgcactctgcccccatttccccgatgtcccctgcgggcgcgggcagccacccaagcctgctggctgcggccccctctcggccaggcattggctcagccngctgagtggggggtcgtgggccagtccccgaggagctgggcccctgcacaggcacacagggcccggccacacccagcggccccccgcacagccacccgtggggtgctgcccttatcgcccggcgccgggcaccaactccatgtttggtgtttgtctgtgtttgtttttcaagaaatgattcaaattgctgcttggattttgaaatttactgtaactgtcagtgtacacgtctggaccccgtttcatttttacaccaatttggtaaaaatgctgctctcagcctcccacaattaaaccgcatgtgatctcccc

SEQ ID NO: 162 - DNA, 1100 bp, Homo sapiens
gcgccatgtgtgctgctcggctagcggcggcggcggcccagtcggtgtatgccttctcggcgcgcccgctggccggcggggagcctgtgagcctgggctccctgcggggcaaggtactacttatcgagaatgtggcgtccctctgaggcaccacggtccgggactacacccagatgaacgagctgcagcggcgcctcggaccccggggcctggtggtgctcggcttcccgtgcaaccagtttgggcatcaggtgcgccgggcggagcggggcggggcgggggcggacgtgcagtagtggctgggggcgccggcggtgtgctggtgggtgccgtcggctccatgcgcggagagtctggctactctctcgtttcctttctgttgctcgtagctgctgaaattcctctccgcccttgggattgcgcatggagggcaaaatcccggtgactcatagaaaatctcccttgtttgtggttagaacgtttctctcctcctcttgaccccgggttctagctgcccttctctcctgtaggagaacgccaagaacgaagagattctgaattccctcaagtacgtccggcctggtggtgggttcgagcccaacttcatgctcttcgagaagtgcgaggtgaacggtgcgggggcgcaccctctcttcgccttcctgcgggaggccctgccagctcccagcgacgacgccaccgcgcttatgaccgaccccaagctcatcacctggtctccggtgtgtcgcaacgatgttgcctggaactttgagaagttcctggtgggccctgacggtgtgcccctacgcaggtacagccgccgcttccagaccattgacatcgagcctgacatcgaagccctgctgtctcaagggcccagctgtgcctagggcgcccctcctaccccggctgcttggcagttgcagtgctgctgtctcgggggggttttcatctatgagggtgtttcctctaaacctacgagggaggaacacctgatcttacagaaaataccacctcgagatgggtgctggtcctgttgatcccagtctctgccagaccaaggcgagtttccccactaataaagtgccgggtgtcagcag

SEQ ID NO: 163 - DNA, 1856 bp, Homo sapiens
agccaaaagaggaagggaccggcctcccacgtccacagggacctgacttccacctctctgcccagatttgcttatgtcactgtcgccccgggacggggaggtggggagctgagggcaagtcgcgcccgcccctgaaatcccagccgcctagcgattggctgcaagggtctcggcttggccgcggattaatcacacccgagggcttgaaaggtggctgggagcgccggacacctcagacggacggtggccagggatcaggcagcggctcaggcgaccctgagtgtgcccccaccccgccatggcccggctgctgcaggcgtcctgcctgctttccctgctcctggccggcttcgtctcgcagagccggggacaagagaagtcgaagatggactgccatggtggcataagtggcaccatttacgagtacggagccctcaccattgatggggaggagtacatccccttcaagcagtatgctggcaaatacgtcctctttgtcaacgtggccagctactgaggcctgacgggccagtacattgaactgaatgcactacaggaagagcttgcaccattcggtctggtcattctgggctttccctgcaaccaatttggaaaacaggaaccaggagagaactcagagatccttcctaccctcaagtatgtccgaccaggtggaggctttgtccctaatttccagctctttgagaaaggggatgtcaatggagagaaagagcagaaattctacactttcctaaagaactcctgtcctcccacctcggagctcctgggtacatctgaccgcctcttctgggaacccatgaaggttcacgacatccgctggaactttgagaagttcctggtggggccagatggtatacccatcatgcgctggcaccaccggaccacggtcagcaacgtcaagatggacatcctgtcctacatgaggcggcaggcagccctgggggtcaagaggaagtaactgaaggccgtctcatcccatgtccaccatgtaggggagggactttgttcaggaagaaatccgtgtctccaaccacactatctacccatcacagacccctttcctatcactcaaggccccagcctggcacaaatggatgcatacagttctgtgtactgccaggcatgtgggtgtgggtgcaatgtgggtgtttacacacatgcctacaggtatgcgtgattgtgtgtgtgtgcatgggtgtacagccacgtgtctacctatgtgtctttctgggaatgtgtaccatctgtgtgcctgcagctgtgtagtgctggacagtgacaaccctttctctccagttctccactccaatgataatagttcacttatacctaaacccaaaggaaaaaccagctctaggtccaattgttctgctctaactgatacctcaaccttggggccagcatctcccactgcctccaaatattagtaactatgactgacgtccccagaagtttctgggtctaccacactccccaaccccccactcctacttcctgaagggccctcccaaggctacatccccaccccacagttctccctgagagagatcaacctccctgagatcaaccaaggcagatgtgacagcaagggccacggaccccatggcaggggtggcgtcttcatgagggaggggcccaaagcccttgtgggcggacctcccctgagcctgtctgaggggccagcccttagtgcattcaggctaaggcccctgggcagggatgccacccctgctccttcggaggacgtgccctcacccctcactggtccactggcttgagactcaccccgtctgcccagtaaaagcctttctgcagcaaaaaaaaaaaaaaaaaaa

SEQ ID NO: 164 - DNA, 2587 bp, Homo sapiens
  misc_feature (2318)..(2318): n is a, c, g, or t
ccattaggcctatgaattataagatacagtcactttaaaatccactggaaggctgaagagtgagttaaacctcttataatgaatatacagtgaaaccagtagaggcattttatttagggttcctacaagaaagtgcttaaatagcatcgacgcctacatgctacatcctgttcagtctctgcctctgtgatgcagttggccagcaaatatcctccaagtcatcatttgcatagtgctagggataaaatgaggagcaataccaaatgctatacctgcccttatgggtcttatagtccaacgggagaaaaagatattatacaaataatcacggaaaataaatagaaaacgcatccttgtttttgtttagtggatcctctatccttcagagactctggaacccctgtggtcttctcttcatctaatgaccctgaggggatggagttttcaagtccttccagagaggaatgtcccaagcctttgagtagggtaagcatcatggctggcagcctcacaggtttgcttctacttcaggcagtgtcgtgggcatcaggtgcccgcccctgcatccctaaaagcttcggctacagctcggtggtgtgtgtctgcaatgccacatactgtgactcctttgaccccccgacctttcctgcccttggtaccttcagccgctatgagagtacacgcagtgggcgacggatggagctgagtatggggcccatccaggctaatcacacgggcacaggcctgctactgaccctgcagccagaacagaagttccagaaagtgaagggatttggaggggccatgacagatgctgctgctctcaacatccttgccctgtcaccccctgcccaaaatttgctacttaaatcgtacttctctgaagaaggaatcggatataacatcatccgggtacccatggccagctgtgacttctccatccgcacctacacctatgcagacacccctgatgatttccagttgcacaacttcagcctcccagaggaagataccaagctcaagatacccctgattcaccgagccctgcagttggcccagcgtcccgtttcactccttgccagcccctggacatcacccacttggctcaagaccaatggagcggtgaatgggaaggggtcactcaagggacagcccggagacatctaccaccagacctgggccagatactttgtgaagttcctggatgcctatgctgagcacaagttacagttctgggcagtgacagctgaaaatgagccttctgctgggctgttgagtggataccccttccagtgcctgggcttcacccctgaacatcagcgagacttcattgcccgtgacctaggtcctaccctcgccaacagtactcaccacaatgtccgcctactcatgctggatgaccaacgcttgctgctgccccactgggcaaaggtggtactgacagacccagaagcagctaaatatgttcatggcattgctgtacattggtacctggactttctggctccagccaaagccaccctaggggagacacaccgcctgttccccaacaccatgctctttgcctcagaggcctgtgtgggctccaagttctgggagcagagtgtgcggctaggctcctgggatcgagggatgcagtacagccacagcatcatcacgaacctcctgtaccatgtggtcggctggaccgactggaaccttgccctgaaccccgaaggaggacccaattgggtgcgtaactttgtcgacagtcccatcattgtagacatcaccaaggacacgttttacaaacagcccatgttctaccaccttggccacttcagcaagttcattcctgagggctcccagagagtggggctggttgccagtcagaagaacgacctggacgcagtggcactgatgcatcccgatggctctgctgttgtggtcgtgctaaaccgctcctctaaggatgtgcctcttaccatcaaggatcctgctgtgggcttcctggagacaatctcacctggctactccattcacacctacctgtggcatcgccagtgatggagcagatactcaaggaggcactgggctcagcctgggcattaaagggacagagtcagctcacacgctgtctgtgactaaagagggcacagcagggccagtgtgagcttacagcgacgtaagcccaggggcaatggtttgggtgactcactttcccctctaggtggtgcccagggctggaggcccctagaaaaagatcagtaagccccagtgtccccccagcccccatgcttatgtgaacatgcgctgtgtgctgcttgctttggaaactngcctgggtccaggcctagggtgagctcactgtccgtacaaacacaagatcagggctgagggtaaggaaaagaagagactaggaaagctgggcccaaaactggagactgtttgtctttcctagagatgcagaactgggcccgtggagcagcagtgtcagcatcagggcggaagccttaaagcagcagcgggtgtgcccaggcacccagatgattcctatggcaccagccaggaaaaatggcagctcttaaaggagaaaatgtttgagccc

SEQ ID NO: 165 - DNA, 3345 bp, Homo sapiens
atggcctgtccttggaaatttctgttcaagaccaaattccaccagtatgcaatgaatggggaaaaagacatcaacaacaatgtggagaaagccccctgtgccacctccagtccagtgacacaggatgaccttcagtatcacaacctcagcaagcagcagaatgagtccccgcagcccctcgtggagacgggaaagaagtctccagaatctctggtcaagctggatgcaaccccattgtcctccccacggcatgtgaggatcaaaaactggggcagcgggatgactttccaagacacacttcaccataaggccaaagggattttaacttgcaggtccaaatcttgcctggggtccattatgactcccaaaagtttgaccagaggacccagggacaagcctacccctccagatgagcttctacctcaagctatcgaatttgtcaaccaatattacggctccttcaaagaggcaaaaatagaggaacatctggccagggtggaagcggtaacaaaggagatagaaacaacaggaacctaccaactgacgggagatgagctcatcttcgccaccaagcaggcctggcgcaatgccccacgctgcattgggaggatccagtggtccaacctgcaggtcttcgatgcccgcagctgttccactgcccgggaaatgtttgaacacatctgcagacacgtgcgttactccaccaacaatggcaacatcaggtcggccatcaccgtgttcccccagcggagtgatggcaagcacgacttccgggtgtggaatgctcagctgtgcatcgacctgggctggaagcccaatggccgtgaccctgagctcttcgaaatcccacctgaccttgtgcttgaggtggccatggaacatcccaaatacgagtggtttcgggaactggagctaaagtggtacgccctgcctgcagtggccaacatgctgcttgaggtgggcggcctagagttcccagggtgccccttcaatggctggtacatgggcacagagatcggagtccgggacttctgtgacgtccagcgctacaacatcctggaggaagtgggcaggagaatgggcctggaaacgcacaagctggcctcgctctggaaagaccaggctgtcgttgagatcaacattgctgtgctccatagtttccagaagcagaatgtgaccatcatggaccaccactcggctgcagaatccttcatgaagtacatgcagaatgaataccggtcccgtgggggctgcccggcagactggatttggctggtccctcccatgtctgggagcatcacccccgtgtttcaccaggagatgctgaactacgtcctgtcccctttctactactatcaggtagaggcctggaaaacccatgtctggcaggacgagaagcggagacccaagagaagagagattccattgaaagtcttggtcaaagctgtgctctttgcctgtatgctgatgcgcaagacaatggcgtcccgagtcagagtcaccatcctctttgcgacagagacaggaaaatcagaggcgctggcctgggacctgggggccttattcagctgtgccttcaaccccaaggttgtctgcatggataagtacaggctgagctgcctggaggaggaacggctgctgttggtggtgaccagtacgtttggcaatggagactgccctggcaatggagagaaactgaagaaatcgctcttcatgctgaaagagctcaacaacaaattcaggtacgctgtgtttggcctcggctccagcatgtaccctcggttctgcgcctttgctcatgacattgatcagaagctgtcccacctgggggcctctcagctcaccccgatgggagaaggggatgagctcagtgggcaggaggacgccttccgcagctgggccgtgcaaaccttcaaggcagcctgtgagacgtttgatgtccgaggcaaacagcacattcagatccccaagctctacacctccaatgtgacctgggacccgcaccactacaggctcgtgcaggactcacagcctttggacctcagcaaagccctcagcagcatgcatgccaagaacgtgttcaccatgaggctcaaatctcggcagaatctacaaagtccgacatccagccgtgccaccatcctggtggaactctcctgtgaggatggccaaggcctgaactacctgccgggggagcaccttggggtttgcccaggcaaccagccggccctggtccaaggcatcctggagcgagtggtggatggccccacaccccaccagacagtgcgcctggaggccctggatgagagtggcagctactgggtcagtgacaagaggctgcccccctgctcactcagccaggccctcacctacttcctggacatcaccacacccccaacccagctgctgctccaaaagctggcccaggtggccacagaagagcctgagagacagaggctggaggccctgtgccagccctcagagtacagcaagtggaagttcaccaacagccccacattcctggaggtgctagaggagttcccgtccctgcgggtgtctgctggcttcctgctttcccagctccccattctgaagcccaggttctactccatcagctcctcccgggatcacacgcccacggagatccacctgactgtggccgtggtcacctaccacacccgagatggccagggtcccctgcaccacggcgtctgcagcacatggctcaacagcctgaagccccaagacccagtgccctgctttgtgcggaatgccagcggcttccacctccccgaggatccctcccatccttgcatcctcatcgggcctggcacaggcatcgcgcccttccgcagtttctggcagcaacggctccatgactcccagcacaagggagtgcggggaggccgcatgaccttggtgtttgggtgccgccgcccagatgaggaccacatctaccaggaggagatgctggagatggcccagaagggggtgctgcatgcggtgcacacagcctattcccgcctgcctggcaagcccaaggtctatgttcaggacatcctgcggcagcagctggccagcgaggtgctccgtgtgctccacaaggagccaggccacctctatgtttgcggggatgtgcgcatggcccgggacgtggcccacaccctgaagcagctggtggctgccaagctgaaattgaatgaggagcaggtcgaggactatttctttcagctcaagagccagaagcgctatcacgaagatatctttggtgctgtatttccttacgaggcgaagaaggacagggtggcggtgcagcccagcagcctggagatgtcagcgctctga

SEQ ID NO: 166 - DNA, 2731 bp, Homo sapiens
gggtcctgtcccatccatcctgacctgttccatctcagccccaggactcagtactgcggttgccaacactgctgccaggcatgatggatgggccacgttccgatgtgggccgttggggtggcaaccccttgcagccccctaccacgccatctccagagccagagccagagccagacggacgctctcgcagaggaggaggccgttccttctgggctcgctgctgtggctgctgttcatgccgaaatgcggcagatgacgactggggacctgaaccctctgactccaggggtcgagggtccagctctggcactcgaagacctggctcccggggctcagactcccgccggcctgtatcccggggcagcggtgtcaatgcagctggagatggcaccatccgagagggcatgctagtagtgaacggtgtggacttgctgagctcgcgctcggaccagaaccgccgagagcaccacacagacgagtatgagtacgacgagctgatagtgcgccgcgggcagcctttccatatgctcctcctcctgtcccggacctatgaatcctctgatcgcatcacccttgagttactcatcggaaacaaccccgaggtgggcaagggcacgcacgtgatcatcccagtgggcaaggggggcagtggaggctggaaagcccaggtggtcaaggccagtgggcagaatctgaacctgcgggtccacacttcccccaacgccatcatcggcaagtttcagttcacagtccgcacacaatcagacgctggggagttccagttgccctttgacccccgcaatgagatctacatcctcttcaacccctggtgcccagaggacattgtgtacgtggaccatgaggattggcggcaggagtatgttcttaatgagtctgggagaatttactacgggaccgaagcacagattggtgagcggacctggaactacggccagtttgaccacggggtgctggatgcctgcttatacatcctggaccggcgggggatgccatatggaggccgtggagacccagtcaatgtctcccgggtcatctctgccatggtgaactccctggatgacaatggagtcctgattgggaactggtctggtgattactcccgaggcaccaacccatcagcgtgggtgggcagcgtggagatcctgcttagctacctacgcacgggatattccgtcccctatggccagtgctgggtctttgctggcgtgaccaccacagtgctgcgctgcctgggtctggccacccgtactgtcaccaacttcaactccgcccacgacacagacacatcccttaccatggacatctacttcgacgagaacatgaagcccctggagcacctgaaccatgattctgtctggaacttccatgtgtggaacgactgctggatgaagaggccggatctgccctcgggctttgatgggtggcaggtggtggatgccacaccccaagagactagcagtggcatcttctgctgcggcccctgctctgtggagtccatcaagaatggcctggtctacatgaagtacgacacgcctttcatttttgctgaggtgaatagtgacaaggtgtactggcagcggcaggatgatggcagcttcaagattgtttatgtggaggagaaggccatcggcacactcattgtcacaaaggccatcagctccaacatgcgggaggacatcacctacctctataagcacccagaaggctcagacgcagagcggaaggcagtagagacagcagcagcccacggcagcaaacccaatgtgtatgccaaccggggctcagcggaggatgtggccatgcaggtggaggcacaggacgcggtgatggggcaggatctgatggtctctgtgatgctgatcaatcacagcagcagccgccgcacagtgaaactgcacctctacctctcagtcactttctatactggtgtcagtggtaccatcttcaaggagaccaagaaggaagtggagctggcaccaggggcctcggaccgtgtgaccatgccagtggcctacaaggaataccggccccatcttgtggaccagggggccatgctgctcaatgtctcaggccacgtcaaggagagcgggcaggtgctggccaagcagcacaccttccgtctgcgcaccccagacctctccctcacgttactgggagcagcagtggttggccaggagtgtgaagtacagattgtcttcaagaacccccttcccgtcaccctcaccaatgtcgtcttccggctcgaaggctctgggttacagaggcccaagatcctcaacgttggggacattggaggcaatgaaacagtgacactgcgccagtcgtttgtgcctgtgcgaccaggcccccgccagctcattgccagcttggacagcccacagctctcccaggtgcacggtgtcatccaggtggatgtggccccagcccctggggatgggggcttcttctcagacgctggaggtgacagtcacttaggagagaccatccctatggcatctcgaggtggagcttagccccgtgccaggagcaatgggactggagtcagatgagcaaggacattgccccaagataggggcacactacagagcagctccccaggagctcaggtggggagtccagggctcccggagggggagtccagggctcccggagagggagtcagtcttcacttgcactgggggaacagatgctaataaactgttttttaatg

SEQ ID NO: 167 - DNA, 3257 bp, Homo sapiens
aacaggcgtgacgccagttctaaacttgaaacaaaacaaaacttcaaagtacaccaaaatagaacctccttaaagcataaatctcacggagggtctcggccgccagtggaaggagccaccgcccccgccccgaccatggccgaggagctggtcttagagaggtgtgatctggagctggagaccaatggccgagaccaccacacggccgacctgtgccgggagaagctggtggtgcgacggggccagcccttctggctgaccctgcactttgagggccgcaactaccaggccagtgtagacagtctcaccttcagtgtcgtgaccggcccagcccctagccaggaggccgggaccaaggcccgttttccactaagagatgctgtggaggagggtgactggacagccaccgtggtggaccagcaagactgcaccctctcgctgcagctcaccaccccggccaacgcccccatcggcctgtatcgcctcagcctggaggcctccactggctaccagggatccagctttgtgctgggccacttcattttgctcttcaacgcctggtgcccagcggatgctgtgtacctggactcggaagaggagcggcaggagtatgtcctcacccagcagggctttatctaccagggctcggccaagttcatcaagaacataccttggaattttgggcagtttcaagatgggatcctagacatctgcctgatccttctagatgtcaaccccaagttcctgaagaacgccggccgtgactgctcccggcgcagcagccccgtctacgtgggccgggtgggtagtggcatggtcaactgcaacgatgaccagggtgtgctgctgggacgctgggacaacaactacggggacggcgtcagccccatgtcctggatcggcagcgtggacatcctgcggcgctggaagaaccacggctgccagcgcgtcaagtatggccagtgctgggtcttcgccgccgtggcctgcacagtgctgaggtgcctaggcatccctacccgcgtcgtgaccaactacaactcggcccatgaccagaacagcaaccttctcatcgagtacttccgcaatgagtttggggagatccagggtgacaagagcgagatgatctggaacttccactgctgggtggagtcgtggatgaccaggccggacctgcagccggggtacgagggctggcaggccctggacccaacgccccaggagaagagcgaaggaacgtactgctgtggcccagttccagttcgtgccatcaaggagggcgacctgagcaccaagtacgatgcgccctttgtctttgcggaggtcaatgccgacgtggtagactggatccagcaggacgatgggtctgtgcacaaatccatcaaccgttccctgatcgttgggctgaagatcagcactaagagcgtgggccgagacgagcgggaggatatcacccacacctacaaatacccagaggggtcctcagaggagagggaggccttcacaagggcgaaccacctgaacaaactggccgagaaggaggagacagggatggccatgcggatccgtgtgggccagagcatgaacatgggcagtgactttgacgtctttgcccacatcaccaacaacaccgctgaggagtacgtctgccgcctcctgctctgtgcccgcaccgtcagctacaatgggatcttggggcccgagtgtggcaccaagtacctgctcaacctaaccctggagcctttctctgagaagagcgttcctctttgcatcctctatgagaaataccgtgactgccttacggagtccaacctcatcaaggtgcgggccctcctcgtggagccagttatcaacagctacctgctggctgagagggacctctacctggagaatccagaaatcaagatccggatccttggggagcccaagcagaaacgcaagctggtggctgaggtgtccctgcagaacccgctccctgtggccctggaaggctgcaccttcactgtggagggggccggcctgactgaggagcagaagacggtggagatcccagaccccgtggaggcaggggaggaagttaaggtgagaatggacctcgtgccgctccacatgggcctccacaagctggtggtgaacttcgagagcgacaagctgaaggctgtgaagggcttccggaatgtcatcattggccccgcctaagggacccctgctcccagcctgctgagagcccccaccttgatcccaatccttatcccaagctagtgagcaaaatatgccccttattgggccccagaccccagggcagggtgggcagcctatgggggctctcggaaatggaatgtgcccctggcccatctcagcctcctgagcctgtgggtccccactcaccccctttgctgtgaggaatgctctgtgccagaaacagtgggagccctgacctgtgctgactggggctggggtgagagaggaaagacctacattccctctcctgcccagatgccctttggaaagccattgaccacccaccatattgtttgatctacttcatagctccttggagcaggcaaaaaagggacagcatgcccttggctggatcaggaatccagctccctagactgcatcccgtacctcttcccatgactgcacccagctccaggggcccttgggacacccagagctgggtggggacagtgataggcccaaggtcccctccacatcccagcagcccaagcttaatagccctccccctcaacctcaccattgtgaagcacctactatgtgctgggtgcctcccacacttgctggggctcacggggcctccaacccatttaatcaccatgggaaactgttgtgggcgctgcttccaggataaggagactgaggcttagagagaggaggcagccccctccacaccagtggcctcgtggttataagcaaggctgggtaatgtgaaggcccaagagcagagtctgggcctctgactctgagtccactgctccatttataaccccagcctgacctgagactgtcgcagaggctgtctggggcctttatcaaaaaaagactcagccaagacaaggaggtagagaggggactgggggactgggagtcagagccctggctgggttcaggtcccacgtctggccagcgactgccttctcctctctgggcctttgtttccttgttggtcagaggagtgattgaacctgctcatctccaaggatcctctccactccatgtttgcaatacacaattcc

SEQ ID NO: 168 - DNA, 1371 bp, Homo sapiens
ctgcaggggggggggggggctgggacagtgaatcgacaatgccgtcttctgtctcgtggggcatcctcctgctggcaggcctgtgctgcctggtccctgtctccctggctgaggatccccagggagatgctgcccagaagacagatacatcccaccatgatcaggatcacccaaccttcaacaagatcacccccaacctggctgagttcgccttcagcctataccgccagctggcacaccagtccaacagcaccaatatcttcttctccccagtgagcatcgctacagcctttgcaatgctctccctggggaccaaggctgacactcacgatgaaatcctggagggcctgaatttcaacctcacggagattccggaggctcagatccatgaaggcttccaggaactcctccgtaccctcaaccagccagacagccagctccagctgaccaccggcaatggcctgttcctcagcgagggcctgaagctagtggataagtttttggaggatgttaaaaagttgtaccactcagaagccttcactgtcaacttcggggacaccgaagaggccaagaaacagatcaacgattacgtggagaagggtactcaagggaaaattgtggatttggtcaaggagcttgacagagacacagtttttgctctggtgaattacatcttctttaaaggcaaatgggagagaccctttgaagtcaaggacaccgaggaagaggacttccacgtggaccaggtgaccaccgtgaaggtgcctatgatgaagcgtttaggcatgtttaacatccagcactgtaagaagctgtccagctgggtgctgctgatgaaatacctgggcaatgccaccgccatcttcttcctgcctgatgaggggaaactacagcacctggaaaatgaactcacccacgatatcatcaccaagttcctggaaaatgaagacagaaggtctgccagcttacatttacccaaactgtccattactggaacctatgatctgaagagcgtcctgggtcaactgggcatcactaaggtcttcagcaatggggctgacctctccggggtcacagaggaggcacccctgaagctctccaaggccgtgcataaggctgtgctgaccatcgacgagaaagggactgaagctgctggggccatgtttttagaggccatacccatgtctatcccccccgaggtcaagttcaacaaaccctttgtcttcttaatgattgaacaaaataccaagtctcccctcttcatgggaaaagtggtgaatcccacccaaaaataactgcctctcgctcctcaacccctcccctccatccctggccccctccctggatgacattaaagaagggttgagctgg

SEQ ID NO: 169 - DNA, 2377 bp, Homo sapiens
ggggagccgaggcgagcgcgagcgaggtccagcaccatgtgctaggtcactcccagcgcgaggccacacctgggccgtcggagcagcccctcctcacttcaggggtcaccctccccagcacccattgccccaccatggctggggaccggctcccgaggaaggtgatggatgccaagaagctggccagcctgctgcggggcgggcctggggggccgctggtcatcgacagccgctccttcgtggagtacaacagctggcatgtgctcagctccgtcaacatctgctgctccaagctggtgaagcggcggctgcagcagggcaaggtgaccattgcggagctcatccagccggctgcacgcagccaggtggaggctacggagccacaggacgtggtggtctatgaccagagcacgcgggacgccagcgtgctggccgcagacagcttcctctccatcctgctgagcaagctggacggctgcttcgacagcgtggccatcctcactgggggcttcgccaccttctcctcctgcttccccggcctctgcgagggcaagcctgctgccctgctacccatgagcctctcccagccctgcctgcctgtgcccagcgtgggcctgacccgcatcctgcctcacctctacctgggctcgcagaaggacgtcctaaacaaggatctgatgacgcaaaatggaataagctacgtcctcaacgccagcaactcctgccccaagcctgacttcatctgcgagagccgcttcatgcgggtccccatcaacgacaactactgtgaaaaactgctgccctggctggacaagtccatcgagttcatcgataaagccaagctctccagctgccaagtcatcgtccactgtctggctggcatctcccgctctgccaccatcgccatcgcctacatcatgaagaccatgggcatgtcctccgacgacgcctacaggttcgtgaaggacaggcgcccgtccatctcgcccaacttcaacttcctgggccagctgctggagtacgagcgcacgctgaagctgctggccgccctgcagggcgacccgggcaccccctcagggacgccggagcctccgcccagtcctgccgccggggccccgctgccacggctgccaccacctacctcagagagcgctgccacagggaatgcggctgccagggagggcggcctgagcgcgggcggggagccccccgcgccccccacgcccccggcgaccagcgcactgcagcagggcctgcgcggcctgcacctctcctcggaccgcctgcaggacactaaccgcctcaagcgctccttctccctggacatcaagtctgcctacgcccctagcaggcggcccgacggccccgggccccccgaccccggcgaggccccgaagctctgcaagctggacagcccgtcgggggccgcgctgggcctgtcctcgcccagcccggacagcccggacgccgcgcctgaggcgcgcccacggccccgccggcggccccggccccccgccggctcccccgcgcgctcccccgcgcacagcctcggcctgaacttcggcgatgcggcccggcagactccgcggcacggcctctcggccctgtcggcgcccgggctgcccggccctggccagccggccggccccggggcctgggcaccgccgcttgactccccaggcacgccgtcgcccgacgggccctggtgcttcagccccgagggcgcacagggggcgggcggggtgctgtttgcgcccttcggccgggcgggcgccccgggaccaggcggcggcagcgacctgcggcggcgggaggcagcgagggctgagccccgggacgcgcggaccggctggcccgaggagccggccccggagacgcagttcaagcgccgcagctgccagatggagttcgaggagggcatggtggaggggcgcgcgcgcggcgaggagctggccgccctgggcaagcaggcgagcttctcgggcagcgtggaggtcatcgaggtgtcctgacccctccgctgccctcggccccgccgcccgcagccaggcccgttataaatgtatattatatataatgcaaagaaaggtaaatggttttactgggatttttatcgagaagtaaatatttcgattttttatttatttaagctgttcattctggcaatgatttggcaacagtgcgggtggtcctcgagctctatttttactgtctggtatttaaactgaaacatacgtttctaagcaatacgaggccaccttcagtcgcaagctgggtgccaggcctggggccctcccagttcccccgccccaggaaacactgctgacctttgcaaaggctgccgagctttcgtgcactttttacataacaaaaaggg

SEQ ID NO: 170 - DNA, 2771 bp, Homo sapiens
  misc_feature (2658)..(2658): n is a, c, g, or t
  misc_feature (2660)..(2660): n is a, c, g, or t
  misc_feature (2753)..(2753): n is a, c, g, or t
gtactcgccacggcacccaggctgcgcgcacgcggtcccggtgtgcagctggagagcgagcggccaccgggagcccccggcacagcccgcgcccgccccgcaggagcccgcgaagatgccccggcgcagcctgcacgcggcggccgtgctcctgctggtgatcttaaaggaacagccttccagcccggccccagtgaacggttccaagtggacttattttggtcctgatggggagaatagctggtccaagaagtacccgtcgtgtgggggcctgctgcagtcccccatagacctgcacagtgacatcctccagtatgacgccagcctcacgcccctcgagttccaaggctacaatctgtctgccaacaagcagtttctcctgaccaacaatggccattcagtgaagctgaacctgccctcggacatgcacatccagggcctccagtctcgctacagtgccacgcagctgcacctgcactgggggaacccgaatgacccgcacggctctgagcacaccgtcagcggacagcacttcgccgccgagctgcacattgtccattataactcagacctttatcctgacgccagcactgccagcaacaagtcagaaggcctcgctgtcctggctgttctcattgagatgggctccttcaatccgtcctatgacaagatcttcagtcaccttcaacatgtaaagtacaaaggccaggaagcattcgtcccgggattcaacattgaagagctgcttccggagaggaccgctgaatattaccgctaccgggggtccctgaccacacccccttgcaaccccactgtgctctggacagttttccgaaaccccgtgcaaatttcccaggagcagctgctggctttggagacagccctgtactgcacacacatggacgacccttcccccagagaaatgatcaacaacttccggcaggtccagaagttcgatgagaggctggtatacacctccttctcccaagtgcaagtctgtactgcggcaggactgagtctgggcatcatcctctcactggccctggctggcattcttggcatctgtattgtggtggtggtgtccatttggcttttcagaaggaagagtatcaaaaaaggtgataacaagggagtcatttacaagccagccaccaagatggagactgaggcccacgcttgaggtccccggagctcccgggcacatccaggaaggaccttgctttggaccctacacacttcggctctctggacacttgcgacacctcaaggtgttctctgtagctcaatctgcaaacatgccaggcctcagggatcctctgctgggtgcctccttgccttgggaccatggccaccccagagccatccgatcgatggatgggtgcatctcagaccaagcagcaggaattcaaagctgcttgctgtaactgtgtgagattgtgaagtggtctgaattctggaatcacaaaccaagccatgctggtgggccattaatggttggaaaacactttcatcggggctttgccagagcgtgctttcaagtgtcctggaaagtctgctgcttctccaagctttcagacaagaatgtgcactctctgcttagtttgcttgggaaactcaacttctttcctctggagacggggcatctccctctgatttccttctgctatgacaaaacctttaatctgcaccttacaactcggggacaaatgggacaggaaggatcaagttgtagagagaaaaaagaaaacaagagatatacattgtgatatattagggacactttcacagtcctgtcttctggatcacagacactgcacagaccttagggaatggcaggttcaagttccacttcttggtggggatgagaagggagagagagctagagggacaaagagaatgagaagacatggatgatctgggagagtctcagtttggaatcagaattggaatcacattctgtttatcaagccataatgtaaggacagaataatacaatattaagtccaaatccaacctcctgtcagtggagcagttatgttttatactctacagattttacaaataatgaggctgttccttgaaaatgtgttgttgctgtgtcctggaggagacatgagttccgagatgacccaatctgcctttgaatctggaggaaataggcagaaacaaaatgactgtagaacttattctctgtaggccaaatttcatttcagccacttctgcaggatccctactgccaacctggaatggagacttttatctacttctctcttctctgaagatgtcaaatcgtggtttagatcaaatatatttcaagctataaaagcaggaggttatctgtgcagggggctggcatcatgtatttaggggcaagtaataatggaatgctactaagatactccatattcttccccgaatcaacacagacagtttctgacaggcgcaactcctccattttcctcccgcaggtgagaaccctgtggagatgagtcagtgccatgactgagaaggaaccgacccctagttgagagcaccttgcagttccccgagaactttctgattcacagtctcattttgacagcatgaaatgtcctcttgaagcatagctttttaaatatctttttccttctactcctccctctgactctaagaattctntnttctggaatcgcttgaacccaggaggcggaggttgcagtaagccaaggtcatgccactgcactctagcctgggtgacagagcgagactccatntcaaaaaaaaaaaaaaaa

SEQ ID NO: 171 - DNA, 1922 bp, Homo sapiens
gagacctgggcgttggtgaaggcgaggggaaagccagaatactggggtggcggacgccaaggggcgggtgtagcaggcaacctcagggaagctgggaaggcctagcagggtgagagaacccgcacacggggggcacagcgcctccctcgcgagccggtgcgaaaggggccgcctgcggtgtgcgcccagctgcgctcaagggaccttgcacttggcccatctcctgcgcacagcccaggccgggaccgcgggcggtgcggactcagcgggctgggtgcaagggcggggcggggcgtctgcgcccggccccgtctcctgactataaaagcagccgctggctgttgggctccactccgccttccacgtgcacccactgcctcttcccttctcgcttgggaactctagtctcgcctcgggttgcaatggaccccaactgctcctgtgccgctggtaagggacgcccgggttctgtgccttggaatgccaaattcccagacaccatagagagtgtccctgggtttgaggaggtcgtattttgctatcagaggtaaggggactcctttattggtccagtgctttcctgttggccaagctcctgagggcattttcctcctccctgttcctctatgtcagagttgagggtcctgaggctcaaggctgtcctgctcatgtcagagttgagggtcctgaggctcaaggctgtcctgcctcacgtcacctagttggtcacagggctgctggctgagccccaattctctaacctgactctgagctaccggattggataggagacattggataggagggacattgcctcttccaagttcaggacagaaagtcgaagtcttcctaggccgtgatctgcagggactttcctttggagtagaaataggagggtgcttggttttcccagcatgaatggagaggacatggggcttctcttcctcgtctctgagtgggaaaggagctctgacggctggctctggcacagagaagggggaagtggacactcattgacccactgctgtaccttctgcatctcactcaccgttcactggctttttctcttctagcaggtgtctcctgcacctgcgccagctcctgcaagtgcaaagagtgcaaatgcacctcctgcaagaagagtgagtgcggggccatctccaggaatctggggctgtggctaaggttgggagggaacccaaggctgtccctgagtgcctgcttctggggaaccggccttcctttgtccctgtaggttgtcacgcctgtctagtcttctgcactttccaaggcttatgtgaggtggggcagctttctcaaaggaagacccattccaatgtccaccagttgtctcctgacaaaaaccatgccatcatgaactaagggtcctctggggctggagggatggagacaggcctctgttggggcagggagttctatgatcgagtctgctctgacctctcaatctcctttcctccccaaggctgctgctcctgctgccctgtgggctgtgccaagtgtgcccaaggctgcatctgcaaaggggcatcggagaagtgcagctgctgcgcctgatgtcgggacagccctgctcccaagtacaaatagagtgacccgtaaaatctaggattttttgttttttgctacaatcttgacccctttgctacattcccttttttctgtgaaatatgtgaataataattaaacacttagacttgattcccgttctggttcctgttgtgtttttggaatgagggactggggtgggagattgaactgggagttcacactgggctctggacggaaatgtgagtgctaaacaagctgagcgccttcaggcagccccgttacttctctgacctccttcctctgtaaaaggcacctgcaccgtgccggatgatatggggatggggacatacgcg

SEQ ID NO: 172 - DNA, 3131 bp, Homo sapiens
tgccagcgggtcgcaccggctagctggctgccagagcctctgaggcagcgcaggggtcagttcccacccccacccgtcccaggcccaggccgaagccagcgcccagctttcctcactgttcctgtggaggatgtctacgcccaggcgagctcctcgacctctgagggaccatctccccgaccactgcccagccctctgctccctccccagaggaggcgggagggtgggctctatattttcattccaaataaaattctctttctaaaagccaggctgacctgctgctgcaagggtggggctgagaagtctggaaacctggagacagaggatgtcacaggagtcacacatgtgcagaaggtctgggggcagtgagcagccccacaggcattgctcccctggattgtcaggcagggaaactgaggcagaagacctgagaacacatgcaaggctgcatccagcttcaagttggtgctgcttcttccttggaggacaggcccggcagcccagcctcctccagagagactggggagggtctggtgtggaccaggggtcctgcagcagggaggggcaggtggggtatgtgggcaggaagcggaagcctgggccacccttcactgcagacgagcactgagctcacttctcgctcgacacagccagagctggaggtgggtgcccggcacggaggggcctgcggaccaatggtaagcctcggagccccccgggttcttgggatgggggccacaggcggtcggggctagaatgtctgggcctgtggagctaaggagggccccacattggccccagggaagaggtgagacctaagaggagtatggcagaggctgaacctttctctcacctgagctgggctccctgggactccaggcctggcccccagcaccccataccggaccaggcccctgtcaggagccctgggaaggcccttacctggtcttcctgtgagcgggaacttgcattcctggagcctgggcggacagcctggggtggtgggggaggctggctgcacctcagcacccctcccccgacaccccccacctagcctgttccgaccgcagacttcctctggcagctgcgcccgcctcccccagccccccccagcccccggccctgcacgcctgtggccctcagggactgggagtggaacggaaaccctgccgctggggcagccccgtggtggggagggaggaagaggggcctcacggacccccgtttggggacctggccaagcagaagatgagcagttgcctctgggtgcatccaggcccctccatcccccatcccaggcctcagggagagccagccctgacaccagctagcaacctccttccctccctcccatctcctctcccacccacccaggcagcctagacacatttaatccatacttattgagcacctactaacatgcttgacccaaaaagcccccgtttcctagcagcttattgtggggggtagataagacaatagacataaaaaatgagtacagttatctcctgcgttaggtgacatggaaggaaaaaggcactgagtgctggggggtgctggggtgggctgcagtgatagacatcagggtagaggttaaggtcaggttcagcctcactggggtgaagtttgagcacggtgagcaggccatgcagcccgggggaggggaggatgggaggaggtggagctttccgggcagagggaacagccagtgcgaaggccccaggcaggtggcttaatgcagctgttgggggaggtgagtggtagggaggaggctggagggatgggggctgatctcacagggccagagcctggttgaccaaataaggccttggccttttctgcttggctgtcccaagaggatcccaaagagaaaaaaacgaaagtggtcttggtcacccagcctgccccacaccaggccccaccccaggtgctgagccctctgagcccctgcctgtctcccacaggctctgccctgcaccttagggctcgggatgctgctggccctgccaggggccttgggctcgggtggcagcgcggaggacagcgtgggctccagctctgtcaccgttgtcctgctgctgctgctgctcctactgctggccactggcctagcactggcctggcgccgcctcagccgtgactcagggggctactaccacccggcccgcctaggtgccgcgctgtggggccgcacgcggcgcctgctctgggccagccccccaggtcgctggctgcaggcccgagctgagctggggtccacagacaatgaccttgagcgacaggaggatgagcaggacacagactatgaccacgtcgcggatggtggcctgcaggctgaccctggggaaggcgagcagcaatgtggagaggcgtccagcccagagcaggtccccgtgcgggctgaggaagccagagacagtgacacggagggcgacctggtcctcggctccccaggaccagcgagcgcagggggcagtgctgaggccctgctgagtgacctgcacgcctttgctggcagcgcagcctgggatgacagcgccagggcagctgggggccagggcctccatgtcaccgcactgtagaggccggtcttggtgtcccatccctgtcacagccgctcactccccgtgcctctgcttcccaagatgccatggctggactggacccccagcccacatgaccatgcctcagactgtcaccccctaccagttcccaagtccatgtgtaccccgctcaccacgggaacggccccccccaaccacaggcatcaggcaaccatttgaaataaaactccttcagcctgtggccctgtggtcctacagagacccctccctcctggaccaggggctcctcctggcacaatccaacccaaccctgcccctaggcatgcagcacaaagagccaggtcagcaccatgattcagccctttaatcttccacgggagcagttgagcgcggggcgtggcgggcggccctccgtgcccatgattcaggggcacagctgccccagcagacacacactttcatacgcactcacaccccacccccagacacacccccaggtctctggaactggcccagggtcctgctgctctcacagccgcaggacagggctcaagggctaccctc

SEQ ID NO: 173 - DNA, 435 bp, Homo sapiens
  misc_feature (148)..(148): n is a, c, g, or t
  misc_feature (246)..(246): n is a, c, g, or t
  misc_feature (348)..(348): n is a, c, g, or t
  misc_feature (374)..(374): n is a, c, g, or t
ggcccagagcaggtccccgtgcgggctgaggaagccagagacagtgacacggagggcgacctggtcctcggctccccaggaccagcgagcgcagggggcagtgctgaggccctgctgagtgacctgcacgcctttgctggcagcgcancttgggatgacagcgccagggcagctgggggccagggctccatgtcaccgcactgtagaggccggtcttggtgtcccatccctgtcacagccgctcantccccgtgcctctgcttcccaagatgccatggctggactggacccccagcccacattgaccatgcctcagactgtcaccccctaccaagttcccaagtccantgtgtaccccgctcaccacgggaacnggccccccccaaccacaggcatcaggcaaccatttgaaataaaactccttcagcctgtgaa

SEQ ID NO: 174 - DNA, 1059 bp, Homo sapiens
gatgccttccgtgccttccatcaagatctcaattttgtgcgcaagttcctacagcccctgttgattggagagctggctccggaagaacccagccaggatggacccctgaatgcgcagctggtcgaggacttccgagccctgcaccaggcagccgaggacatgaagctgtttgatgccagtcccaccttctttgctttcctactgggccacatcctggccatggaggtgctggcctggctccttatctacctcctgggtcctggctgggtgcccagtgccctggccgccttcatcctggccatctctcaggctcagtcctggtgtctgcagcatgacctgggccatgcctccatcttcaagaagtcctggtggaaccacgtggcccagaagttcgtgatggggcagctaaagggcttctccgcccactggtggaacttccgccacttccagcaccacgccaagcccaacatcttccacaaagacccagacgtgacggtggcgcccgtcttcctcctgggggagtcatccgtcgagtatggcaagaagaaacgcagatacctaccctacaaccagcagcacctgtacttcttcctgatcggcccgccgctgctcaccctggtgaactttgaagtggaaaatctggcgtacatgctggtgtgcatgcagtgggcggatttgctctgggccgccagcttctatgcccgcttcttcttatcctacctccccttctacggcggtcctggaaagccactggttcgtgtggatcacacagatgaaccacatccccaaggagatcggccacgagaagcaccgggactgggtcagctctcagctggcagccacctgcaacgtggagccctcacttttcaccaactggttcagcgggcacctcaacttccagatcgagcaccacctcttccccaggatgccgagacacaactacagccgggtggccccgctggtcaagtcgctgtgtgccaagcacggcctcagctacgaagtgaagcccttcctcaccgcgctggtggacatcgtcaggtccctgaagaagtctggtga

SEQ ID NO: 175 - DNA, 1144 bp, Homo sapiens
atgggaattcaaggcctggccaaactaattgctgatgtggcccccagtgccatccgggagaatgacatcaagagctactttggccgtaaggtggccattgatgcctctatgagcatttatcagttcctgattgctgttcgccagggtggggatgtgctgcagaatgaggagggtgagaccaccagccacctgatgggcatgttctaccgcaccattcgcatgatggagaacggcatcaagcccgtgtatgtctttgatggcaagccgccacagctcaagtcaggcgagctggccaaacgcagtgagcggcgggctgaggcagagaagcagctgcagcaggctcaggctgctggggccgagcaggaggtggaaaaattcactaagcggctggtgaaggtcactaagcagcacaatgatgagtgcaaacatctgctgagcctcatgggcatcccttatcttgatgcacccagtgaggcagaggccagctgtgctgccctggtgaaggctggcaaagtctatgctgcggctaccgaggacatggactgcctcaccttcggcagccctgtgctaatgcgacacctgactgccagtgaagccaaaaagctgccaatccaggaattccacctgagccggattctgcaggagctgggcctgaaccaggaacagtttgtggatctgtgcatcctgctaggcagtgactactgtgagagtatccggggtattgggcccaagcgggctgtggacctcatccagaagcacaagagcatcgaggagatcgtgcggcgacttgaccccaacaagtaccctgtgccagaaaattggctccacaaggaggctcaccagctcttcttggaacctgaggtgctggacccagagtctgtggagctgaagtggagcgagccaaatgaagaagagctgatcaagttcatgtgtggtgaaaagcagttctctgaggagcgaatccgcagtggggtcaagaggctgagtaagagccgccaaggcagcacccagggccgcctggatgatttcttcaaggtgaccggctcactctcttcagctaagcgcaaggagccagaacccaagggatccactaagaagaaggcaaagactggggcagcagggaagtttaaaaggggaaaataaa

SEQ ID NO: 176 - DNA, 2004 bp, Homo sapiens
caggccacccgccgctaagctgagaagggagagcgagcttaggaccgcctgcccggggcaaccccgaaccaagctttagccgccgaggccgcgtgtcccaaaggccagtcatccctcctctgtgttgccatgggaattcaaggcctggccaaactaattgctgatgtggcccccagtgccatccgggagaatgacatcaagagctactttggccgtaaggtggccattgatgcctctatgagcatttatcagttcctgattgctgttcgccagggtggggatgtgctgcagaatgaggagggtgagaccaccagccacctgatgggcatgttctaccgcaccattcgcatgatggagaacggcatcaagcccgtgtatgtctttgatggcaagccgccacagctcaagtcaggcgagctggccaaacgcagtgagcggcgggctgaggcagagaagcagctgcagcaggctcaggctgctggggccgagcaggaggtggaaaaattcactaagcggctggtgaaggtcactaagcagcacaatgatgagtgcaaacatctgctgagcctcatgggcatcccttatcttgatgcacccagtgaggcagaggccagctgtgctgccctggtgaaggctggcaaagtctatgctgcggctaccgaggacatggactgcctcaccttcggcagccctgtgctaatgcgacacctgactgccagtgaagccaaaaagctgccaatccaggaattccacctgagccggattctgcaggagctgggcctgaaccaggaacagtttgtggatctgtgcatcctgctaggcagtgactactgtgagagtatccggggtattgggcccaagcgggctgtggacctcatccagaagcacaagagcatcgaggagatcgtgcggcgacttgaccccaacaagtaccctgtgccagaaaattggctccacaaggaggctcaccagctcttcttggaacctgaggtgctggacccagagtctgtggagctgaagtggagcgagccaaatgaagaagagctgatcaagttcatgtgtggtgaaaagcagttctctgaggagcgaatccgcagtggggtcaagaggctgagtaagagccgccaaggcagcacccagggccgcctggatgatttcttcaaggtgaccggctcactctcttcagctaagcgcaaggagccagaacccaagggatccactaagaagaaggcaaagactggggcagcagggaagtttaaaaggggaaaataaatgtgtttccccattatacctccttcaccccagaatatttgccgtcttgtacccttaagagctacagctagagaaaccttcacggggtggagagaggattctaaggcttttctagcgtgacccttttcagtagtgctagtcccttttttacttgatcttaatggcaagaaggccacagaggtacttttccttttttagctcaggaaaatatgtcaggctcaaaccacttctcaggcagtttaatggacactaagtccattgttacatgaaagtgatagatagcaacaagttttggagaagagagagggagataaaagggggagacaaaagatgtacagaaatgatttcctggctggccaactggtggccagtgggaggtgatggtggacctagactgtgcttttctgtcttgttcagccttgacccaccttgagagagagccaccaggaaggcgcatcttagcagatgggaggaactgctgagagaagatgggcagaaagctggagcccctggagttggctgtgtctgtgtttgtgactgattactggctgtgtcttgggtgggcagaaactcgaacttgctatgtaatttgtgtctagttattcagaggagtaagatggtgatgttcacctggcaatcagctgagttgagactttggaataagacactggttttcatgcgctgtttttgttttaaagttatgaagaaaaaagtcaataaaattctaaaagt

SEQ ID NO: 177 - DNA, 2245 bp, Homo sapiens
ggagcaagaggtggttggggggggaccatggctgacgttttcccgggcaacgactccacggcgtctcaggacgtggccaaccgcttcgcccgcaaaggggcgctgaggcagaagaacgtgcacgaggtgaaggaccacaaattcatcgcgcgcttcttcaagcagcccaccttctgcagccactgcaccgacttcatctgggggtttgggaaacaaggcttccagtgccaagtttgctgttttgtggtccacaagaggtgccatgaatttgttactttttcttgtccgggtgcggataagggacccgacactgatgaccccaggagcaagcacaagttcaaaatccacacttacggaagccccaccttctgcgatcactgtgggtcactgctctatggacttatccatcaagggatgaaatgtgacacctgcgatatgaacgttcacaagcaatgcgtcatcaatgtccccagcctctgcggaatggatcacactgagaagagggggcggatttacctaaaggctgaggttgctgatgaaaagctccatgtcacagtacgagatgcaaaaaatctaatccctatggatccaaacgggctttcagatccttatgtgaagctgaaacttattcctgatcccaagaatgaaagcaagcaaaaaaccaaaaccatccgctccacactaaatccgcagtggaatgagtcctttacattcaaattgaaaccttcagacaaagaccgacgactgtctgtagaaatctgggactgggatcgaacaacaaggaatgacttcatgggatccctttcctttggagtttcggagctgatgaagatgccggccagtggatggtacaagttgcttaaccaagaagaaggtgagtactacaacgtacccattccggaaggggacgaggaaggaaacatggaactcaggcagaaattcgagaaagccaaacttggccctgctggcaacaaagtcatcagtccctctgaagacaggaaacaaccttccaacaaccttgaccgagtgaaactcacggacttcaatttcctcatggtgttgggaaaggggagttttggaaaggtgatgcttgccgacaggaagggcacagaagaactgtatgcaatcaaaatcctgaagaaggatgtggtgattcaggatgatgacgtggagtgcaccatggtagaaaagcgagtcttggccctgcttgacaaacccccgttcttgacgcagctgcactcctgcttccagacagtggatcggctgtacttcgtcatggaatatgtcaacggtggggacctcatgtaccacattcagcaagtaggaaaatttaaggaaccacaagcagtattctatgcggcagagatttccatcggattgttctttcttcataaaagaggaatcatttatagggatctgaagttagataacgtcatgttggattcagaaggacatatcaaaattgctgactttgggatgtgcaaggaacacatgatggatggagtcacgaccaggaccttctgtgggactccagattatatcgccccagagataatcgcttatcagccgtatggaaaatctgtggactggtgggcctatggcgtcctgttgtatgaaatgcttgccgggcagcctccatttgatggtgaagatgaagacgagctatttcagtctatcatggagcacaacgtttcctatccaaaatccttgtccaaggaggctgtttctatctgcaaaggactgatgaccaaacacccagccaagcggctgggctgtgggcctgagggggagagggacgtgagagagcatgccttcttccggaggatcgactgggaaaaactggagaacagggagatccagccaccattcaagcccaaagtgtgtggcaaaggagcagagaactttgacaagttcttcacacgaggacagcccgtcttaacaccacctgatcagctggttattgctaacatagaccagtctgattttgaagggttctcgtatgtcaacccccagtttgtgcaccccatcttacagagtgcagtatgaaactcaccagcgagaacaaacacctccccagcccccagccctccccgcagtggaagtgaatccttaaccctaaaattttaaggccacggcttgtgtctgattccatatggaggcctgaaaattgtagggttattagtccaaatgtgatcaactgttcagggtctctctcttacaaccaagaacattatcttagtggaag

SEQ ID NO: 178 - DNA, 2917 bp, Homo sapiens
  misc_feature (560)..(593): n is a, c, g, or t
cgcagcccgcggtcccgcggccccggggccggcacctctcgggctccggctccccgcgcgcaagatggctgacccggctgcggggccgccgccgagcgagggcgaggagagcaccgtgcgcttcgcccgcaaaggcgccctccggcagaagaacgtgcatgaggtcaagaaccacaaattcaccgcccgcttcttcaagcagcccaccttctgcagccactgcaccgacttcatctggggcttcgggaagcagggattccagtgccaagtttgctgctttgtggtgcacaagcggtgccatgaatttgtcacattctcctgccctggcgctgacaagggtccagcctccgatgacccccgcagcaaacacaagtttaagatccacacgtactccagccccacgttttgtgaccactgtgggtcactgctgtatggactcatccaccaggggatgaaatgtgacacctgcatgatgaatgtgcacaagcgctgcgtgatgaatgttcccagcctgtgtggcacggaccacacggagcgccgcggccgcatctacatccagnnnnnnnnnnnnnnnnnnnnnnnnnnnnnnnnnntaagagatgctaaaaaccttgtacctatggaccccaatggcctgtcagatccctacgtaaaactgaaactgattcccgatcccaaaagtgagagcaaacagaagaccaaaaccatcaaatgctccctcaaccctgagtggaatgagacatttagatttcagctgaaagaatcggacaaagacagaagactgtcagtagagatttgggattgggatttgaccagcaggaatgacttcatgggatctttgtcctttgggatttctgaacttcagaaagccagtgttgatggctggtttaagttactgagccaggaggaaggcgagtacttcaatgtgcctgtgccaccagaaggaagtgaggccaatgaagaactgcggcagaaatttgagagggccaagatcagtcagggaaccaaggtcccggaagaaaagacgaccaacactgtctccaaatttgacaacaatggcaacagagaccggatgaaactgaccgattttaacttcctaatggtgctggggaaaggcagctttggcaaggtcatgctttcagaacgaaaaggcacagatgagctctatgctgtgaagatcctgaagaaggacgttgtgatccaagatgatgacgtggagtgcactatggtggagaagcgggtgttggccctgcctgggaagccgcccttcctgacccagctccactcctgcttccagaccatggaccgcctgtactttgtgatggagtacgtgaatgggggcgacctcatgtatcacatccagcaagtcggccggttcaaggagccccatgctgtattttacgctgcagaaattgccatcggtctgttcttcttacagagtaagggcatcatttaccgtgacctaaaacttgacaacgtgatgctcgattctgagggacacatcaagattgccgattttggcatgtgtaaggaaaacatctgggatggggtgacaaccaagacattctgtggcactccagactacatcgcccccgagataattgcttatcagccctatgggaagtccgtggattggtgggcatttggagtcctgctgtatgaaatgttggctgggcaggcaccctttgaaggggaggatgaagatgaactcttccaatccatcatggaacacaacgtagcctatcccaagtctatgtccaaggaagctgtggccatctgcaaagggctgatgaccaaacacccaggcaaacgtctgggttgtggacctgaaggcgaacgtgatatcaaagagcatgcatttttccggtatattgattgggagaaacttgaacgcaaagagatccagcccccttataagccaaaagcttgtgggcgaaatgctgaaaacttcgaccgatttttcacccgccatccaccagtcctaacacctcccgaccaggaagtcatcaggaatattgaccaatcagaattcgaaggattttcctttgttaactctgaatttttaaaacccgaagtcaagagctaagtagatgtgtagatctccgtccttcatttctgtcattcaagctcaacggctattgtggtgacatttttatgtttttcattgccaagttgcatccatgtttgattttctgatgagactagagtgacagtgtttcagaacccaaatgtcctcaggtagtttggagcatctctatgagatgggattatgcagatggcctatggaaaatgcagctgcataattaacacattatcaaagtcctcttacaatttattttccgcagcatgtcagctaagtagacccaatggggagagaaaatgcctgctttctttccctctttttctgcactgccatattcacccccaaccatccaatctgtggataattggatgttagcggtactcttccacttccgggcctggagcttggcttgtatccaagtgtatggttgctttgcctaagaggaatccctctatttcacctgttctggaggcaccagaccttgaaaagaacatgctcaaaataaaatgttatctgttatttttgtaaactcaaagttaagatgatcaaagttctaaaattccaagaatgtgcttttagacggtctcaatctaaaagcacttcaaggggtcaaagggcaaccagcttgggtgctacctcagtgttgtagtttctgatactttatgtctttgctcaccctcatccccaaactacttgaaaagggcatttggcaccactctctgaaacaacacagtcactctagcaaggcccccaaagggccctggttttacattacatttcaaactttatttgctttggggttttgtttctgttgttgttcaaatgcaaaaaaaa

SEQ ID NO: 179 - DNA, 2955 bp, Homo sapiens
cgcagcccgcggtcccgccgccccggggccggcacctctcgggctccggctccccgcgcgcaagatggctgacccggctgcggggccgccgccgagcgagggcgaggagagcaccgtgcgcttcgcccgcaaaggcgccctcaggcagaagaacgtgcatgaggtcaagaaccacaaattcaccgcccgcttcttcaagcagcccaccttctgcagccactgcaccgacttcatctggggcttcgggaagcagggattccagtgccaagtttgctgctttgtggtgcacaagcggtgccatgaatttgtcacattctcctgccctggcgctgacaagggtccagcctccgatgacccccgcagcaaacacaagtttaagatccacacgtactccagccccacgttttgtgaccactgtgggtcactgctgtatggactcatccaccaggggatgaaatgtgacacctgcatgatgaacgtgcacaagcgctgcgtgatgaatgttcccagcctgtgtggcacggaccacacggagcgccgcggccgcatctacatccaggcccacatcgacagggacgtcctcattgtcctcgtaagagatgctaaaaaccttgtacctatggaccccaatggcctgtcagatccctacgtaaaactgaaactgattcccgatcccaaaagtgagagcaaacagaagaccaaaaccatcaaatgctccctcaaccctgagtggaatgagacatttagatttcagctgaaagaatcggacaaagacagaagactgtcagtagagatttgggattgggatttgaccagcaggaatgacttcatgggatctttgtcctttgggatttctgaacttcagaaagccagtgttgatggctggtttaagttactgagccaggaggaaggcgagtacttcaatgtgcctgtgccaccagaaggaagtgaggccaatgaagaactgcggcagaaatttgagagggccaagatcagtcagggaaccaaggtcccggaagaaaagacgaccaacactgtctccaaatttgacaacaatggcaacagagaccggatgaaactgaccgattttaacttcctaatggtgctggggaaaggcagctttggcaaggtcatgctttcagaacgaaaaggcacagatgagctctatgctgtgaagatcctgaagaaggacgttgtgatccaagatgatgacgtggagtgcactatggtggagaagcgggtgttggccctgcccgggaagccgcccttcctgacccagctccactcctgcttccagaccatggaccgcctgtactttgtgatggagtacgtgaatgggggcgacctcatgtatcacatccagcaagtcggccggttcaaggagccccatgctgtattttacgctgcagaaattgccatcggtctgttcttcttacagagtaagggcatcatttaccgtgacctaaaacttgacaacgtgatgctcgattctgagggacacatcaagattgccgattttggcatgtgtaaggaaaacatctgggatggggtgacaaccaagacattctgtggcactccagactacatcgcccccgagataattgcttatcagccctatgggaagtccgtggattggtgggcatttggagtcctgctgtatgaaatgttggctgggcaggcaccctttgaaggggaggatgaggatgaactcttccaatccatcatggaacacaacgtagcctatcccaagtctatgtccaaggaagctgtggccatctgcaaagggctgatgaccaaacacccaggcaaacgtctgggttgtggacctgaaggtgaacgtgatatcaaagagcatgcatttttccggtatattgattgggagaaacttgaacgcaaagagattcagcccccttataagccaaaagcttgtgggcgaaatgctgaaaacttcgaccgatttttcacccgccatccaccagtcctaacacctcctgaccaggaagtcatcaggaatattgaccaatcagaattcgaaggattttcctttgttaactctgaatttttaaaacccgaagtcaagagctaagtagatgtgtagatctccgtccttcatttctgtcattcaagctcaacggctattgtggtgacatttttatgttttcattgccaagttgcatccatgtttgattttctgatgagactagagtgacagtgtttcagaacccaaatgtcctcaggtagttttggagcatctctatgagatgggattatgcagatggcctatggaaaatgcagctgcataattaacacattatcaaagtcctcttacaatttattttccgcagcatgtcagctaagtagacccaatggggagagaaaatgcctgctttctttcccttttttctgcactgccatattcacccccaaccatccaatctgtggataattggatgttagcggtactcttccacttccgggcctggagcttggcttgtatccaagtgtatggttgctttgcctaagaggaatccctctatttcacctgttctggaggcaccagaccttgaaaagaacatgctcaaaataaaatgttatctgttatttttgtaaactcaaagttaagatgatcaaagttctaaaattccaagaatgtgcttttagacggtctcaatctaaaagcacttcaaggggtcaaagggcaaccagcttgggtgctacctcagtgttgtagtttctgatactttatgtctttgctcaccctcatccccaaactacttgaaaagggcatttggcaccactctctgaaacaacacagtcactctagcaaggcccccaaagggccctggttttacattacatttcaaactttatttgctttggggttttgtttctgttgttgttcaaatgcaaaaaaaaattatttgctttggggttttatttctgttgttcaaatgc

SEQ ID NO: 180 - DNA, 1635 bp, Homo sapiens
ctcccgtagtcgtagttcccgtagtatggcggcccctgccgccgccaccgccatgggcaacgcccccgccaagaaggacaccgagcaggaggagagcgtgaacgagttcctagccaaagccagaggagatttcctctacagatggggaaaccccgctcaaaacaccgccagctcggatcagttcgaacggctcaggacgctgggcatgggctccttcgggcgggtgatgctggtgaggcaccaggagaccggcggccactacgccatgaagatcctcaacaagcagaaggtggtgaagatgaagcaggtcgagcacatactgaacgagaagcgcatcctgcaggcgatcgactttccgttcctcgtcaagctccagttctcctttaaggacaactcctacctgtacctggtgatggagtacgtgccgggtggggagatgttctcccgcctacagcgcgtcggaaggtttagcgagccccatgcctgtttctatgccgcccaggtcgtcctggccgtccagtacctacactcgctcgacctcatccaccgcgacctgaagcccgagaatctcctcatcgaccagcagggctacctgcaggtgacggacttcggtttcgccaagcgcgtgaagggccgcacttggaccttgtgcgggaccccagagtacctggcccccgagatcatcctgagcaaaggctacaacaaggccgtggactggtgggccctaggggtgctcatctatgagatggccgtgggcttcccacccttctacgccgaccagcccatccagatctacgagaagatcgtctctgggagggtgcggtttccctccaaactcagctctgacctcaaggatctgctgcggagcctgctgcaggtggacctcaccaagcgcttcggaaacctcaggaacggggttggcgacatcaagaaccacaagtggttcgccacaaccagctggatcgccatctatgagaagaaggtggaagctcccttcatcccgaagtacacaggccctggggatgccagtaactttgacgactacgaggaggaagagctccggatctccatcaatgagaagtgtgccaaggagttttctgagttttaggggtgtgcttgtgcccctgtggttttctttcctttttgtttttggtggtttgggggatgggagggttggattgaacagccagagggccccagagttccttgtatctaatttcatcctcacccacctccagggttgggggagcaggaagcccagatatttggaggaacagaaacaccagctgctccctcacccccccccatgccttcctggtccctctgtgcttctctctttctcctccacaggtcccccttgccccagcccccttctgcctgttttaaacgagtttctcagctctattcaggccaggtcttgctgttgtatcaagggacacggtgtggaaagaggggctcaaacttaactccagccctgaacaggcaccacttactaagagaggatgaatgaaaagcacacctaccctttggcgtaatcctgcctgggaaggagagaggtttagtgccatgttcagtgggctgtttgctagaataaaaaattaaaacaaaaaacaattaaaatcttatttaagttcc

SEQ ID NO: 181 - DNA, 2163 bp, Homo sapiens
aaagcgaccatgtatcctgagtggaagtcgacgttcgatgcccacatctatgaggggcgcgtcatccagattgtgctaatgcgggcagcagaggagccagtgtctgaggtgaccgtgggtgtgtcggtgctggccgagcgctgcaagaagaacaatggcaaggctgagttctggctggacctgcagcctcaggccaaggtgttgatgtctgttcagtatttcctggaggacgtggattgcaaacagtctatgcgcagtgaggacgaggccaagttcccaacgatgaaccgccgcggagccatcaaacaggccaaaatccactacatcaagaaccatgagtttatcgccaccttctttgggcaacccaccttctgttctgtgtgcaaagactttgtctggggcctcaacaagcaaggctacaaatgcaggcaatgtaacgctgccatccacaagaaatgcatcgacaagatcatcggcagatgcactggcaccgcggccaacagccgggacactatattccagaaagaacgcttcaacatcgacatgccgcaccgcttcaaggttcacaactacatgagccccaccttctgtgaccactgcggcagcctgctctggggactggtgaagcagggattaaagtgtgaagactgcggcatgaatgtgcaccataaatgccgggagaaggtggccaacctctgcggcatcaaccagaagcttttggctgaggccttgaaccaagtcacccagagagcctcccggagatcagactcagcctcctcagagcctgttgggatatatcagggtttcgagaagaagaccggagttgctggggaggacatgcaagacaacagtgggacctacggcaagatctgggagggcagcagcaagtgcaacatcaacaacttcatcttccacaaggtcctgggcaaaggcagcttcgggaaggtgctgcttggagagctgaagggcagaggagagtactttgccatcaaggccctcaagaaggatgtggtcctgatcgacgacgacgtggagtgcaccatggttgagaagcgggtgctgacacttgccgcagagaatccctttctcacccacctcatctgcaccttccagaccaaggaccacctgttctttgtgatggagttcctcaacgggggggacctgatgtaccacatccaggacaaaggccgctttgaactctaccgtgccacgttttatgccgctgagataatgtgtggactgcagtttctacacagcaagggcatcatttacagggacctcaaactggacaatgtgctgttggaccgggatggccacatcaagattgccgactttgggatgtgcaaagagaacatattcggggagagccgggccagcaccttctgcggcacccctgactatatcgcccctgagatcctacagggcctgaagtacacattctctgtggactggtggtctttcggggtccttctgtacgagatgctcattggccagtcccccttccatggtgatgatgaggatgaactcttcgagtccatccgtgtggacacgccacattatccccgctggatcaccaaggagtccaaggacatcctggagaagctctttgaaagggaaccaaccaagaggctgggagtgacgggaaacatcaaaatccaccccttcttcaagaccataaactggactctgctggaaaagcggaggttggagccacccttcaggcccaaagtgaagtcacccagagactacagtaactttgaccaggagttcctgaacgagaaggcgcgcctctcctacagcgacaagaacctcatcgactccatggaccagtctgcattcgctggcttctcctttgtgaaccccaaattcgagcacctcctggaagattgaggttcctggacagatcaggctagccctgccctccacccacacctgcccgctccccacgataagcaccagtgggactgtggtgacttctgctgctggccccgcccctgcccccagagcgtccttggctgccgtctggccgggctctcatggtacttcctctgtgaactgtgtgtgaatctgcttttcctctgccttcggagggaaattgtaaatcctgtgtttcattacttgaatgtagttatctattgaaaatatactttagagcacaatgga

SEQ ID NO: 182 - DNA, 641 bp, Homo sapiens
gaattcccgtgatagacagactgtccaccatctgaaccttcattcaccaccattcgataacccttcttccgagcctctcctctggtcgcgcggggaggagaggcgagatggcagatgagattgccaaggctcaggtcgctcggcctggtggcgacacgatctttgggaagatcatccgcaaggaaataccagccaaaatcatttttgaggatgaccggtgccttgctttccatgacatttcccctcaagcaccaacacattttctggtgatacccaagaaacatatatcccagatttctgtggcagaagatgatgatgaaagtcttcttggacacttaatgattgttggcaagaaatgtgctgctgatctgggcctgaataagggttatcgaatggtggtgaatgaaggttcagatggtggacagtctgtctatcacgttcatctccatgttcttggaggtcggcaaatgcattggcctcctggttaagcacgttttggggataattttctcttctttagcatgataagttaggcaatttccagtatgttaagtaacacacttatttttcctgtgtatggagagattcaagaaataattttaaacccgctacataataaaagacattgttgcatggaattc

SEQ ID NO: 183 - DNA, 2268 bp, Homo sapiens
atgagctggtcaccttccctgacaacgcagacatgtggggcctgggaaatgaaagagcgccttgggacagggggatttggaaatgtcatccgatggcacaatcaggaaacaggtgagcagattgccatcaagcagtgccggcaggagctcagcccccggaaccgagagcggtggtgcctggagatccagatcatgagaaggctgacccaccccaatgtggtggctgcccgagatgtccctgaggggatgcagaacttggcgcccaatgacctgcccctgctggccatggagtactgccaaggaggagatctccggaagtacctgaaccagtttgagaactgctgtggtctgcgggaaggtgccatcctcaccttgctgagtgacattgcctctgcgcttagataccttcatgaaaacagaatcatccatcgggatctaaagccagaaaacatcgtcctgcagcaaggagaacagaggttaatacacaaaattattgacctaggatatgccaaggagctggatcagggcagtctttgcacatcattcgtggggaccctgcagtacctggccccagagctactggagcagcagaagtacacagtgaccgtcgactactggagcttcggcaccctggcctttgagtgcatcacgggcttccggcccttcctccccaactggcagcccgtgcagtggcattcaaaagtgcggcagaagagtgaggtggacattgttgttagcgaagacttgaatggaacggtgaagttttcaagctctttaccctaccccaataatcttaacagtgtcctggctgagcgactggagaagtggctgcaactgatgctgatgtggcacccccgacagaggggcacggatcccacgtatgggcccaatggctgcttcaaggccctggatgacatcttaaacttaaagctggttcatatcttgaacatggtcacgggcaccatccacacctaccctgtgacagaggatgagagtctgcagagcttgaaggccagaatccaacaggacacgggcatcccagaggaggaccaggagctgctgcaggaagcgggcctggcgttgatccccgataagcctgccactcagtgtatttcagacggcaagttaaatgagggccacacattggacatggatcttgtttttctctttgacaacagtaaaatcacctatgagactcagatctccccacggccccaacctgaaagtgtcagctgtatccttcaagagcccaagaggaatctcgccttcttccagctgaggaaggtgtggggccaggtctggcacagcatccagaccctgaaggaagattgcaaccggctgcagcagggacagcgagccgccatgatgaatctcctccgaaacaacagctgcctctccaaaatgaagaattccatggcttccatgtctcagcagctcaaggccaagttggatttcttcaaaaccagcatccagattgacctggagaagtacagcgagcaaaccgagtttgggatcacatcagataaactgctgctggcctggagggaaatggagcaggctgtggagctctgtgggcgggagaacgaagtgaaactcctggtagaacggatgatggctctgcagaccgacattgtggacttacagaggagccccatgggccggaagcaggggggaacgctggacgacctagaggagcaagcaagggagctgtacaggagactaagggaaaaacctcgagaccagcgaactgagggtgacagtcaggaaatggtacggctgctgcttcaggcaattcagagcttcgagaagaaagtgcgagtgatctatacgcagctcagtaaaactgtggtttgcaagcagaaggcgctggaactgttgcccaaggtggaagaggtggtgagcttaatgaatgaggatgagaagactgttgtccggctgcaggagaagcggcagaaggagctctggaatctcctgaagattgcttgtagcaaggtccgtggtcctgtcagtggaagcccggatagcatgaatgcctctcgacttagccagcctgggcagctgatgtctcagccctccacggcctccaacagcttacctgagccagccaagaagagtgaagaactggtggctgaagcacataacctctgcaccctgctagaaaatgccatacaggacactgtgagggaacaagaccagagtttcacggccctagactggagctggttacagacggaagaagaagagcacagctgcctggagcaggcctca

SEQ ID NO: 184 - DNA, 5296 bp, Homo sapiens
gaattcgataattcccatgtcttcgactcagggcaatggggaacactggaagtccctggagtcagtgggcatcagccgcaaagagctagcgatggccgaagccctgcagatggagtatgatgccctgtcccggctccggcatgacaaggaggagaacagagccaagcagaacgcagacccctctctcatcagctgggatgagtctggggtagacttttacagcaagccagcaggaaggtggaccgacctcaagctgttacgcggtctctctggctctgatcctacccttaactacaactcactatccccactggaagggccgcccaaccactctacctcccaagggccacagcctggctcagatccctggcccaaaggctccctgtctggagactatctctacatttttgatggttcagatgggggagtctcttcgtccccaggaccaggggacatagagggctcttgcaagaaactatccccacctcctctgcctccccgagcttctatctgggatacccctcccctgcctcccagaaaggggtccccctcatcctccaagatctcccagcccagtgacatcaacactttctctttggtcgaacaattgccaggcaaactgctagagcatcggatcctagaagaggaagaggtgctgggaggtgggggtcaggggcgcctactggggtctgtggactatgatggtatcaatgatgcaattactaggctcaacttgaaatcgacctatgatgcggagatgttgcgggatgccaccaggggctggaaggagggccgagggccgctggacttcagcaaagacacctctggaaaacccgtggccaggagcgagactatgccccctcaggtgcccccccgcacctatgcctcccgctatggcaaccgaaagaatgcgacgcctggcaagaaccgccggatttctgcagccccggtgggctcccggccccacactgttgccaatggccatgagttgtttgaggtctcagaagagagagatgaggaggttgctgcattttgccacatgctggatatccttcgatctggctctgacatccaagactacttcctcactggctatgtctggagtgctgtcacccctagcccagagcacctcggggatgaggtcaacctgaaggtgactgtgttgtgtgacaggcttcaagaggcactcactttcacctgcaactgttcctccactgtagacttgcttatctaccagaccctgtgctacacccatgatgacctgaggaatgtggacgtgggtgactttgtgctaaagccctgcgggctggaggagttcctgcagaacaagcatgccttgggcagtcatgagtacatccaatactgccgcaagtttgacattgacattcggctacagctgatggagcagaaggttgtgcgcagtgacctggcccggacggtgaatgatgaccagagcccctccaccttgaactacctcgtccatctccaagagaggcctgtcaagcagaccatcagcaggcaggccctgagtcttctgttcgacacttaccacaatgaggtggatgccttcctgctggctgatggagacttcccactgaaggctgacagggtggtccagtccgtcaaggccatctgcaacgccctggccgccgtggaaacccctgagatcaccagtgctctcaaccagctgcccccctgcccctcccgcatgcagtctaaaattcagaaggatcccagtgtcttggctgtgagggaaaaccgagagaaggtcgtggaagccctgaccgctgccatcttggacctggtggagctgtactgcaacacattcaacgcagacttccagacggcagtgcccgggagccgcaagcatgacctggtccaggaggcctgccatttcgccaggtccctggcctttactgtctatgccacccaccgcatccccatcatctgggctaccagctatgaagatttctacctctcctgctccctcagccatggcggcaaggagctgtgcagccccctgcagacccgaagagctcacttctccaagtacctcttccacctcatcgtctgggaccagcagatctgcttcccagtgcaggtgaaccggctgcctcgggagacactgctgtgtgccactctctatgctctgcccatccccccaccggggagctcctcagaggccaataagcagcggcgggtgcctgaagccctgggctgggtcactaccccactcttcaacttcaggcaggtcctgacctgtggccggaagcttctgggtttgtggccagcaacacaggaaaatcccagcgcccgttggagtgcacctaatttccaccagccagacagtgtcatcctgcagattgacttccccacctcggcctttgacatcaagttcaccagcccccctggagacaagttcagcccccgctatgagtttggcagcctccgggaagaagaccagcgcaagcttaaagacatcatgcagaaagagtccttgtactggctcactgatgctgacaagaagcgcctgtgggagaagcgatattactgccactcggaggtgagctcgctccccctggtgctcgccagcgcccccagctgggagtgggcttgcctgcctgacatctatgttctcctgaagcagtggacccacatgaaccaccaggatgccctggggctcctgcatgccaccttcccggaccaggaggtgcgtcgtatggctgtgcagtggattggctcactctcagatgctgagctgctagactacctgccccagctggtacaggccctgaagtatgaatgctacctggacagcccgttggtgcgcttcctcctgaaacgagctgtgtctgacttgagagtgactcactacttcttctggttactgaaggacggcctcaaggactctcagttcagcatccgctaccagtatctgctggcagccttactgtgctgctgtggcaaggggctgagagaagagtttaaccgccagtgctggcttgtcaatgccctggccaaactggcccagcaggtccgggaggcagccccatctgcaaggcagggaatcctccgcacgggcctggaggaggtgaagcagttctttgccctcaatggctcgtgccgcttgccactcagccccagtctgctggttaagggaattgtgcccagggactgttcctacttcaactccaatgctgtccccctcaaactctccttccaaaatgtggatcccctgggtgagaacatccgtgtcatcttcaagtgtggggacgaccttcgccaggacatgctaacgctgcagatgattcgcatcatgagcaagatctgggtccaggaggggctggacatgcgcatggtcatcttccgctgcttctccaccggccggggcagagggatggtggagatgatccctaatgctgagaccctgcgtaagatccaggtggagcatggggtgaccggctcgttcaaggaccggcccctggcagactggctgcagaaacacaaccctggggaggacgagtatgagaaggctgtggagaactttatctactcctgcgctggctgctgcgtggccacgtacgtcttgggcatctgtgaccgacataacgacaacatcatgctgaagaccactggtcacatgttccacattgattttggccgcttcctgggccatgcccagatgtttggcaacatcaagcgggaccgtgccccctttgtcttcacctcggacatggcgtatgtcatcaacgggggtgacaagccttccagccgcttccatgattttgttgacctttgctgccaagcctacaacctcattcgcaagcacacccacctcttcctcaaccttctgggcctgatgttgtcctgtgggatccctgaactctcagacctggaggacctcaagtatgtgtacgatgccctgaggcctcaggatacagaggccaatgccactacctacttcactaggttgattgagtccagcctgggcagtgtagccacaaagctcaattttttcatccataatctggctcagatgaagttcacgggctcagatgaccggctgaccctctcctttgcctcccgaacacacactctcaagagctctggccgaatcagtgatgttttcctctgccgccatgagaagatcttccaccccaacaaaggctatatatatgtggtaaaggtgatgcgagagaacactcacgaggccacctacatccagcggacctttgaggagttccaggaattacacaataagttgcggctgctcttcccttcttcccacttgcccagcttccctagtcgcttcgtgatcggccgctcccggggagaggcggtggccgagcggcggagggaggagctaaacggttacatctggcacttgatccacgcacctcccgaggtggccgagtgtgatttggtgtacaccttcttccacccactgccccgggatgagaaggctatgggcaccagcccagctcctaagtcctcagatggcacatgggcccggcccgtcggaaaggtgggaggggaggtgaagctgtctatctcctacaaaaacaataaactcttcatcatggtgatgcatattcggggcttgcaactgctccaggatggaaatgaccctgacccctatgtgaaaatttacctccttcctgaccctcagaaaaccactaagaggaaaaccaaagtggcccggaaaacctgcaatcctacctacaatgagatgttggtatatgatgggatccccaagggtgacctgcagcagcgggagctccagctgagcgtgctgagtgagcagggattctgggagaacgtcctcctcggtgaggtgaacatccgcctgcgagagctggacctggctcaggagaagaccggctggttcgccctgggatctcgaagtcatggcaccttgtgagcccagcagagccaccacccagcatcccaggctggtggcaggagctgggggagaggactctcccctgtgagactcctccttgtgaagggccagggccctgggcaggcctccagctcggtccaggtgattctggcctctgtggtaggaggcagggagagtaagacatgctctgctgtctcttcctctggagactgaacttgggttggttgtgatgagcagccccttggaggctgtgaggttgcagcaaagttttaagtttaccttgtgtcaagggagcaatgcttggtttggggagtgtgtggggtgggctgtatgaagtagcattttgggggtgggtgggtggatatcaagcttatcgataccgtcgacctcgag

SEQ ID NO: 185 - DNA, 2187 bp, Homo sapiens
tcgggcgcgggcgcggggcgcggggctgggcccgggcggagcggcggctgctccggacatgtcgggccctcgcgccggcttctaccggcaggagctgaacaagaccgtgtgggaggtgccgcagcggctgcaggggctgcgcccggtgggctccggcgcctacggctccgtctgttcggcctacgacgcccggctgcgccagaaggtggcggtgaagaagctgtcgcgccccttccagtcgctgatccacgcgcgcagaacgtaccgggagctgcggctgctcaagcacctgaagcacgagaacgtcatcgggcttctggacgtcttcacgccggccacgtccatcgaggacttcagcgaagtgtacttggtgaccaccctgatgggcgccgacctgaacaacatcgtcaagtgccaggcgctgagcgacgagcacgttcaattcctggtttaccagctgctgcgcgggctgaagtacatccactcggccgggatcatccaccgggacctgaagcccagcaacgtggctgtgaacgaggactgtgagctcaggatcctggattttgggctggcgcgccaggcggacgaggagatgaccggctatgtggccacgcgctggtaccgggcacctgagatcatgctcaactggatgcattacaaccaaacagtggatatctggtccgtgggctgcatcatggctgagctgctccagggcaaggccctcttcccgggaagcgactacattgaccagctgaagcgcatcatggaagtggtgggcacacccagccctgaggttctggcaaaaatctcctcagaacacgcccggacatatatccagtccctgccccccatgccccagaaggacctgagcagcatcttccgtggagccaaccccctggccatagacctccttggaaggatgctggtgctggacagtgaccagagggtcagtgcagctgaggcactggcccacgcctacttcagccagtaccacgaccccgaggatgagccagaggccgagccatatgatgagagcgttgaggccaaggagcgcacgctggaggagtggaaggagctcacttaccaggaagtcctcagcttcaagcccccagagccaccgaagccacctggcagcctggagattgagcagtgaggtgctgcccagcagcccctgagagcctgtggaggggcttgggcctgcacccttccacagctggcctggtttcctcgagaggcacctcccacactcctatggtcacagacttctggcctaggacccctcgccttcaggagaatctacacgcatgtatgcatgcacaaacatgtgtgtacatgtgcttgccatgtgtaggagtctgggcacaagtgtccctgggcctaccttggtcctcctgtcctcttctggctactgcactctccactgggacctgactgtggggtcctagatgccaaaggggttcccctgcggagttcccctgtctgtcccaggccgacccaagggagtgtcagccttgggctctcttctgtcccagggctttctggaggacgcgctggggccgggaccccgggagactcaaagggagaggtctcagtggttagagctgctcagcctggaggtagggggctgtcttggtcactgctgagacccacaggtctaagaggagaggcagagccagtgtgccaccaggctgggcagggacaaccaccaggtgtcaaatgagaaaagctgcctggagtcttgtgttcacccgtgggtgtgtgtgggcacgtgtggatgagcgtgcactccccgtgttcatatgtcagggcacatgtgatgtggtgcgtgtgaatctgtgggcgcccaaggccagcagccatatctggcaagaagctggagccggggtgggtgtgctgttgccttccctctcctcggttcctgatgccttgaggggtgtttcagactggcggcaccgttgtggccctgcagccggagatctgaggtgctctggtctgtgggtcagtcctctttccttgtcccaggatggagctgatccagtaacctcggagacgggaccctgcccagagctgagttgggggtgtggctctgccctggaaagggggtgacctcttgcctcgaggggcccagggaagcctgggtgtcaagtgcctgcaccaggggtgcacaataaagggggttctctctca

SEQ ID NO: 186 - DNA, 1218 bp, Homo sapiens
aattctgctccggacatgtcgggccctcgcgccggcttctaccggcaggagctgaacaagaccgtgtgggaggtgccgcagcggctgcaggggctgcgcccggtgggctccggcgcctacggctccgtctgttcggcctacgacgcccggctgcgccagaaggtggcggtgaagaagctgtcgcgccccttccagtcgctgatccacgcgcgcagaacgtaccgggagctgcggctgctcaagcacctgaagcacgagaacgtcatcgggcttctggacgtcttcacgccggccacgtccatcgaggacttcagcgaagtgtacttggtgaccaccctgatgggcgccgacctgaacaacatcgtcaagtgccaggcgctgagcgacgagcacgttcaattcctggtttaccagctgctgcgcgggctgaagtacatccactcggccgggatcatccaccgggacctgaagcccagcaacgtggctgtgaacgaggactgtgagctcaggatcctggatttcgggctggcgcgccaggcggacgaggagatgaccggctatgtggccacgcgctggtaccgggcacctgagatcatgctcaactggatgcattacaaccaaacagtggatatctggtccgtgggctgcatcatggctgagctgctccagggcaaggccctcttcccgggaagcgactacattgaccagctgaagcgcatcatggaagtggtgggcacacccagccctgaggttctggcaaaaatctcctcggaacacgcccggacatatatccagtccctgccccccatgccccagaaggacctgagcagcatcttccgtggagccaaccccctggccatagacctccttggaaggatgctggtgctggacagtgaccagagggtcagtgcagctgaggcactggcccacgcctacttcagccagtaccacgaccccgaggatgagccagaggccgagccatatgatgagagcgttgaggccaaggagcgcacgctggaggagtggaaggagctcacttaccaggaagtccttagcttcaagcccccagagccaccgaagccacctggcagcctggagattgagcagtgaggtgctgcccagcagcccctgagagcctgtggaggggcttgggcctgcacccttccacagctggcctggtttcctcgagaggcacctcccacactcctatggtcacag

SEQ ID NO: 187 - DNA, 2681 bp, Homo sapiens
ggtgcagcactgagccgccgacggggcgggtgggctttgctgccgagcaggcggcgccgtcttggggcctagcggcgaggcgacccgcacaggtgggcggtggcggtaggtgggtggccagcgactggcaacgcggtggcttagacgcgcgagatccggccagggtcagagtactgtaagattgatgttaaaggcatggtgttcaccccacttcatcagcgtacataagttatctcttcttttggacccttattttatgccataatgcaacaagctttagaactagctttggatcgtgcagagtatgtcattgaaagtgcccgacagagacctcctaaaaggaaatacctatcaagtggaagaaaatctgtatttcaaaaactttatgacttgtatattgaagaatgtgaaaaagaacctgaagttaagcagaaattaagaagaaatgtgaacttgttagagaagcttgttatgcaagagactttgtcatgtttagtggtcaatctatacccaggaaatgagggatattctctgatgctcaggggaaaaaacggatcagattccgagaccattcgactgccctatgaagaaggagagttgcttgaatatttggatgcagaagaattacctcctattttggttgatctcctagaaaaatctcaggttaatatttttcattgcggatgtgtcatagcagaaatacgtgactacaggcagtccagtaacatgaaatctcctggttaccaaagtcggcacattctcttacgtccaacaatgcagactttaatttgtgatgtacattcaataacaagtgataaccacaaatggacccaggaagacaaacttttgcttgagagccagctcatcctagctacagctgaaccactctgtcttgatccttctatagcagtcacctgcactgcaaacagactgctctataacaagcaaaagatgaacactcgcccaatgaaacggtgtttcaagaggtattccagatcctctctgaatcggcagcaagatctatctcattgtccacctcctcctcagctgaggttacttgatttcttacaaaaaagaaaggaaagaaaagcaggtcagcattatgacctcaaaatttctaaggcaggaaattgtgtagatatgtggaaacggagtccctgtaatttggccataccttctgaagtagatgtggagaaatatgctaaagtggaaaagtctatcaaatctgatgactcacagccaacagtctggccagcccatgatgtaaaagatgattatgtatttgaatgtgaagctggtactcagtatcagaaaacaaagctgaccatcttgcagtcgcttggagatccactttactatggtaaaatacagccatgtaaagcagatgaagaaagtgacagccagatgtctccatcacactcgtccacagatgatcattcaaattggttcattattggatcaaagaccgatgctgagagggtagtcaatcagtaccaagaattagtccagaatgaagccaaatgtccggtcaagatgtcacacagctccagtggctcagccagtctgagtcaggtttctccagggaaagaaacagatcaaactgaaaccgtgtcagttcagtcttcggtattggggaagggtgtaaaacatcgacccccaccaatcaaacttccctcaagctcaggaaatagttcctcaggtaactattttacaccacaacagacaagcagctttctcaaatctccaactcctcctccttcttctaagccatcaagtattcctcggaaatcatctgtggatctcaatcaagttagcatgctttctccagctgccctatcacctgccagctcatcacaaagaaccacggccacccaggtcatggcaaactctgctggacttaacttcatcaatgtagtgggctctgtttgtggggcccaggctttgatgagtggttcaaaccccatgctgggctgtaacactggtgccataactcctgcaggaataaacctgagcggccttctaccctcaggaggtctgctaccaaatgcactgcccagtgcaatgcaggcagcttctcaagcaggtgttccatttggtttaaaaaatacttcaagtctcaggcccttaaatctactccagcttccaggtggttcacttatttttaacactctgcagcagcagcaacagcagctctcccagtttacaccacaacaacctcagcagcccacaacttgtagtcctcaacagccaggggagcagggttctgagcaaggttcaaccagtcaagaacaggccttatctgctcagcaagctgctgttattaaccttactggagtaggaagttttatgcagtcacaggcagctgcagttgcgattcttgcagcatcaaatggctatggcagcagcagcagcacaaacagctcagctacatcatcatcggcatacaggcagccagtcaaaaagtaaaatgaagagaggcacgccaaccactccaaaattttgagtcttgcattactttttgttccttttttaaaaacacaagagcactgaatcaaaagaattgagtttctactttttgttttttttaatgtgtcagtattttacattgctagatgtacaaactttatacagaagcacaaccttatcatttttaaataaaaacagggaaatggtttaacaaa

SEQ ID NO: 188 - DNA, 5792 bp, Homo sapiens
aaagttcatccccccagaatgaaaatgaggacatttgagaaggtgatttaaggtgtggacatttgagaaggtgtcctatcaaattagtaaaccaaaggaaaagtactgaatagattaatccaaaacacttactgttttttaaacgaagaggatttcaccttgacagaaaaacaacttttattcaatatgtatttcctgaaattaaagagacaagtacagactgaaaggaaaatagattcgtaaataagctacgtcaactctatcctgctgaggatagctcagtgatgttaaatcctttacaaatccctggttgtcttcctacagacaagactgctttttgatgggactgatattaagagaaataggacctttggggcattcaactccttgataaaacttaaaagtatcggcatgagtggcttaacagaggaaataaagaagttttcaactaaatccaaaagtgcggtcattttctttactgctgttattttaaaaacctcttcataaccattgaaaaagaatcgacaactattttaaaagattaaagaaaggcagatgtctgcaaataattcccctccatcagcccagaagtctgtattacccacagctattcctgctgtgcttccagctgcttctccgtgttcaagtcctaagacgggactctctgcccgactctctaatggaagcttcagtgcaccatcactcaccaactccagaggctcagtgcatacagtttcatttctactgcaaattggcctcacacgggagagtgttaccattgaagcccaggaactgtctttatctgctgtcaaggatcttgtgtgctccatagtttatcaaaagtttccagagtgtggattctttggcatgtatgacaaaattcttctctttcgccatgacatgaactcagaaaacattttgcagctgattacctcagcagatgaaatacatgaaggagacctagtggaagtggttctttcagctttagccacagtagaagacttccagattcgtccacatactctctatgtacattcttacaaagctcctactttctgtgattactgtggtgagatgctgtggggattggtacgtcaaggactgaaatgtgaaggctgtggattaaattaccataaacgatgtgccttcaagattccaaataactgtagtggagtaagaaagagacgtctgtcaaatgtatctttaccaggacccggcctctcagttccaagacccctacagcctgaatatgtagcccttcccagtgaagagtcacatgtccaccaggaaccaagtaagagaattccttcttggagtggtcgcccaatctggatggaaaagatggtaatgtgcagagtgaaagttccacacacatttgctgttcactcttacacccgtcccacgatatgtcagtactgcaagcggttactgaaaggcctctttcgccaaggaatgcagtgtaaagattgcaaattcaactgccataaacgctgtgcatcaaaagtaccaagagactgccttggagaggttactttcaatggagaaccttccagtctgggaacagatacagatataccaatggatattgacaataatgacataaatagtgatagtagtcggggtttggatgacacagaagagccatcacccccagaagataagatgttcttcttggatccatctgatctcgatgtggaaagagatgaagaagccgttaaaacaatcagtccatcaacaagcaataatattccgctaatgagggttgtacaatccatcaagcacacaaagaggaagagcagcacaatggtgaaggaagggtggatggtccattacaccagcagggataacctgagaaagaggcattattggagacttgacagcaaatgtctaacattatttcagaatgaatctggatcaaagtattataaggaaattccactttcagaaattctccgcatatcttcaccacgagatttcacaaacatttcacaaggcagcaatccacactgttttgaaatcattactgatactatggtatacttcgttggtgagaacaatggggacagctctcataatcctgttcttgctgccactggagttggacttgatgtagcacagagctgggaaaaagcaattcgccaagccctcatgcctgttactcctcaagcaagtgtttgcacttctccagggcaagggaaagatcacaaagatttgtctacaagtatctctgtatctaattgtcagattcaggagaatgtggatatcagtactgtttaccagatctttgcagatgaggtgcttggttcaggccagtttggcatcgtttatggaggaaaacatagaaagactgggagggatgtggctattaaagtaattgataagatgagattccccacaaaacaagaaagtcaactccgtaatgaagtggctattttacagaatttgcaccatcctgggattgtaaacctggaatgtatgtttgaaaccccagaacgagtctttgtagtaatggaaaagctgcatggagatatgttggaaatgattctatccagtgagaaaagtcggcttccagaacgaattactaaattcatggtcacacagatacttgttgctttgaggaatctgcattttaagaatattgtgcactgtgatttaaagccagaaaatgtgctgcttgcatcagcagagccatttcctcaggtgaagctgtgtgactttggatttgcacgcatcattggtgaaaagtcattcaggagatctgtggtaggaactccagcatacttagcccctgaagttctccggagcaaaggttacaaccgttccctagatatgtggtcagtgggagttatcatctatgtgagcctcagtggcacatttccttttaatgaggatgaagatataaatgaccaaatccaaaatgctgcatttatgtacccaccaaatccatggagagaaatttctggtgaagcaattgatctgataaacaatctgcttcaagtgaagatgagaaaacgttacagtgttgacaaatctcttagtcatccctggctacaggactatcagacttggcttgaccttagagaatttgaaactcgcattggagaacgttacattacacatgaaagtgatgatgctcgctgggaaatacatgcatacacacataaccttgtatacccaaagcacttcattatggctcctaatccagatgatatggaagaagatccttaatcactgagctaacctaaataaggaaggatttcattttatggactgatattttgctgtgtaacttgttcttcgtagattgtcatctgcagtgctgcaaagatatgaagaaatatgataacgaataagtgacaccagtactgtagttcataatgagtaggtacaggcgggaaactgaataataagaagtcataatggaatcaaggtgaagctttttataaacttttttagcctaagcaataactggttttgtattttttcttaatccttcactttaatacaataggctcacttaatttgtcttcccatttctctttatatatatatatatatataaaaaaatataaatatatgtttgtttgtttgtttttttaaggaaaaacaagtcaagctagcatccagttactatatagcttggctaaattatacaagacttacaagattgattactcgacaggcttgtatttaagagataactgtgaggttaccattatgtgatgttactataaggacttttaacattggtttaacaaaccatagaggcattgaagggtttttcttagatgcctagaaaaagcacactgggctgttttacctttcttttttaggtcaatcaagactccaaaatagtgattcctaacctttttggagttgctctgctactctgaatatgttctatacagcataaggattgtcaccttctgtgtgttgcaacagcttctaagataattagggacaaatgatgttacaaaaggaagagtactgctggtctaagtgctgagttgtatgtctttgcatagctccactctgctgctaaatatgcatgttctgactgacaccatcttgatgccagtactggattccagcattcagcaggtgcagatctcggctttacacaatttatctttacctagggttcagtcagtaatttctgctttttagccagggccagtgcagggtcagttaatgctacagttactgtatagcaaacagtatccttttttctccttcccctagcctattgggctttgcagatatctggagtgttttaaagtcaattattttaagcagtttgaggggatgtgtaggagtggagcatgaaacagtttataaggctggggctgtattatcagcacagcaaattaaagaatgaaagaagtacttctttttacatttcagctccagcagccagctatttaaaaaatatttttaaatatcttccccaaagtttaagatgtgggaccatctacttgtaagaaacagtggcttatttcttcatttctcagtaatcattgtaaacctttttttttttcttctccactctaacaaaagtaaaagaacaaaacttttgctgaggtcttggactccactacttgttagttatgttggcctggacagatggcaggtctgtcggcagttcctcagtctgtaaaatgaagattatcattcttgcctctccctttgtcacagtgttgtcgtgaagatcagatatgtatgaatgcagtcaaataaactaaaaactaggaaagtgttaactatcgttgcccaccgaatttgaggtagcaaaaaaaaaaaagaatgttctggtacatgaacagactgagaaggcctttcgacatccctgaagctagtctcctgtctagactaaaaatatccttgaaagaatagtagcaaacagtatgcagtactcctgtgttctaagttcttttatgttttagtttaccctcacagcagccatagtgttaagtcattatgagcttcatcttaaagataagaaaactgaggcaaggggagattaacttactgccaaatttcaaacagttagtagtatttgagaccagtagtatggctctaatcttacccttagccctcccaaccattatgctgtactatctacccataaatacctccaggaaacattcccctcttggtaatttgtccttctatagaagcttcaaagattaaatcaaattaattttcaaaaaaaatttttttttagaaatgttattttccctgtgatagaggatgacttcccagtttcaccaaagtctgtttatatcaacacacacaaaatggaataattctgagtcactaggcaatcaatctactgtggttttactatgtaaggtgaaaattaactggaacgatgtttgtttgctatacttacatagtcaaactttacaagccatgaaattaattgcactctttgtatttgttgttaaatgcctaagaagttttctaaaaattttgtaaaggcactgtcagagaatctggagttgaatgattattccagatactgtataacctgcataactttttgtctttaagtcgtgtttgtaaaagaagtaattgctagaaacatttgataatgtacaaagtagtctataatgactgttcagtacatttttaatatttttttggttatatccaactttttgtaaatatactggaagcttgataataaaatgtatttcctatcaccatacttttccatgtgaaaacctgagcctatttctagtataagtatccaaagaaaagttttacctggttgtgttattttaccagac

SEQ ID NO: 189 - DNA, 2063 bp, Homo sapiens
catctgaccccaggcccagctcgtcctggctggcctgggtcggcctctggagtatggtctggcgggtgccccctttcttgctccccatcctcttcttggcacccactaccagctggatgtgcagctctaccactgcaccctcctgggcccggcctcgccccctgcacacgtgcttctgccccccagtgggcctccagccccccgacacctccacgcccaggccctctcagactccgagatccagctgacatggaagcacccggaggctctgcctgggccaatatccaagtacgttgtggaggtgcaggtggctgggggtgcaggagacccactgtggatagacgtggacaggcctgaggagacaagcaccatcatccgtggcctcaacgccagcacgcgctacctcttccgcatgcgggccagcattcaggggctcggggactggagcaacacagtagaagagtccaccctgggcaacgggctgcaggctgagggcccagtccaagagagccgggcagctgaagagggcctggatcagcagctgatcctggcggtggtgggctccgtgtctgccacctgcctcaccatcctggctgcccttttaaccctggtgtgcatccgcagaagctgcctgcatcggagacgcaccttcacctaccagtcaggctcgggcgaggagaccatcctgcagttcagctcagggaccttgacacttacccggcggccaaaactgcagcccgagcccctgagctacccagtgctagagtgggaggacatcacctttgaggacctcatcggggaggggaacttcggccaggtcatccgggccatgatcaagaaggacgggctgaagatgaacgcagccatcaaaatgctgaaagagtatgcctctgaaaatgaccatcgtgactttgcgggagaactggaagttctgtgcaaattggggcatcaccccaacatcatcaacctcctgggggcctgtaagaaccgaggttacttgtatatcgctattgaatatgccccctacgggaacctgctagattttctgcggaaaagccgggtcctagagactgacccagcttttgctcgagagcatgggacagcctctacccttagctcccggcagctgctgcgtttcgccagtgatgcggccaatggcatgcagtacctgagtgagaagcagttcatccacagggacctggctgcccggaatgtgctggtcggagagaacctagcctccaagattgcagacttcggcctttctcggggagaggaggtttatgtgaagaagacgatggggcgtctccctgtgcgctggatggccattgagtccctgaactacagtgtctataccaccaagagtgatgtctggtcctttggagtccttctttgggagatagtgagccttggaggtacaccctactgtggcatgacctgtgccgagctctatgaaaagctgccccagggctaccgcatggagcagcctcgaaactgtgacgatgaagtgtacgagctgatgcgtcagtgctggcgggaccgtccctatgagcgacccccctttgcccagattgcgctacagctaggccgcatgctggaagccaggaaggcctatgtgaacatgtcgctgtttgagaacttcacttacgcgggcattgatgccacagctgaggaggcctgagctgccatccagccagaacgtggctctgctggccggagcaaactctgctgtctaacctgtgaccagtctgacccttacagcctctgacttaagctgcctcaaggaatttttttaacttaagggagaaaaaaagggatctggggatggggtgggcttaggggaactgggttcccatgctttgtaggtgtctcatagctatcctgggcatccttctttctagttcagctgccccacaggtgtgtttcccatcccactgctcccccaacacaaacccccactccagctccttcgcttaagccagcactcacaccactaacatgccctgttcagctactcccactcccggcctgtcattcagaaaaaaataaatgttctaataagctcc

SEQ ID NO: 190 - DNA, 4125 bp, Homo sapiens
cttctgtgctgttccttcttgcctctaacttgtaaacaagacgtagtaggacgatgctaatggaaagtcacaaaccgctgggtttttgaaaggatccttgggacctcatgcacatttgtggaaactggatggagagatttggggaagcatggactctttagccagcttagttctctgtggagtcagcttgctcctttctggaactgtggaaggtgccatggacttgatcttgatcaattccctacctcttgtatctgatgctgaaacatctctcacctgcattgcctctgggtggcgcccccatgagcccatcaccataggaagggactttgaagccttaatgaaccagcaccaggatccgctggaagttactcaagatgtgaccagagaatgggctaaaaaagttgtttggaagagagaaaaggctagtaagatcaatggtgcttatttctgtgaagggcgagttcgaggagaggcaatcaggatacgaaccatgaagatgcgtcaacaagcttccttcctaccagctactttaactatgactgtggacaagggagataacgtgaacatatctttcaaaaaggtattgattaaagaagaagatgcagtgatttacaaaaatggttccttcatccattcagtgccccggcatgaagtacctgatattctagaagtacacctgcctcatgctcagccccaggatgctggagtgtactcggccaggtatataggaggaaacctcttcacctcggccttcaccaggctgatagtccggagatgtgaagcccagaagtggggacctgaatgcaaccatctctgtactgcttgtatgaacaatggtgtctgccatgaagatactggagaatgcatttgccctcctgggtttatgggaaggacgtgtgagaaggcttgtgaactgcacacgtttggcagaacttgtaaagaaaggtgcagtggacaagagggatgcaagtcttatgtgttctgtctccctgacccctatgggtgttcctgtgccacaggctggaagggtctgcagtgcaatgaagcatgccaccctggtttttacgggccagattgtaagcttaggtgcagctgcaacaatggggagatgtgtgatcgcttccaaggatgtctctgctctccaggatggcaggggctccagtgtgagagagaaggcatacagaggatgaccccaaagatagtggatttgccagatcatatagaagtaaacagtggtaaatttaatcccatttgcaaagcttctggctggccgctacctactaatgaagaaatgaccctggtgaagccggatgggacagtgctccatccaaaagactttaaccatacggatcatttctcagtagccatattcaccatccaccggatcctcccccctgactcaggagtttgggtctgcagtgtgaacacagtggctgggatggtggaaaagcccttcaacatttctgttaaagttcttccaaagcccctgaatgccccaaacgtgattgacactggacataactttgctgtcatcaacatcagctctgagccttactttggggatggaccaatcaaatccaagaagcttctatacaaacccgttaatcactatgaggcttggcaacatattcaagtgacaaatgagattgttacactcaactatttggaacctcggacagaatatgaactctgtgtgcaactggtccgtcgtggagagggtggggaagggcatcctggacctgtgagacgcttcacaacagcttctatcggactccctcctccaagaggtctaaatctcctgcctaaaagtcagaccactctaaatttgacctggcaaccaatatttccaagctcggaagatgacttttatgttgaagtggagagaaggtctgtgcaaaaaagtgatcagcagaatattaaagttccaggcaacttgacttcggtgctacttaacaacttacatcccagggagcagtacgtggtccgagctagagtcaacaccaaggcccagggggaatggagtgaagatctcactgcttggacccttagtgacattcttcctcctcaaccagaaaacatcaagatttccaacattacacactcctcagctgtgatttcttggacaatattggatggctattctatttcttctattactatccgttacaaggttcaaggcaagaatgaagaccagcacgttgatgtgaagataaagaatgccaccatcactcagtatcagctcaagggcctagagcctgaaacagcataccaggtggacatttttgcagagaacaacatagggtcaagcaacccagccttttctcatgaactggtgaccctcccagaatctcaagcaccagcggacctcggaggggggaagatgctgcttatagccatccttggctctgctggaatgacctgcctgactgtgctgttggcctttctgatcatattgcaattgaagagggcaaatgtgcaaaggagaatggcccaagccttccaaaacgtgagggaagaaccagctgtgcagttcaactcagggactctggccctaaacaggaaggtcaaaaacaacccagatcctacaatttatccagtgcttgactggaatgacatcaaatttcaagatgtgattggggagggcaattttggccaagttcttaaggcgcgcatcaagaaggatgggttacggatggatgctgccatcaaaagaatgaaagaatatgcctccaaagatgatcacagggactttgcaggagaactggaagttctttgtaaacttggacaccatccaaacatcatcaatctcttaggagcatgtgaacatcgaggctacttgtacctggccattgagtacgcgccccatggaaaccttctggacttccttcgcaagagccgtgtgctggagacggacccagcatttgccattgccaatagcaccgcgtccacactgtcctcccagcagctccttcacttcgctgccgacgtggcccggggcatggactacttgagccaaaaacagtttatccacagggatctggctgccagaaacattttagttggtgaaaactatgtggcaaaaatagcagattttggattgtcccgaggtcaagaggtgtatgtgaaaaagacaatgggaaggctcccagtgcgctggatggccatcgagtcactgaattacagtgtgtacacaaccaacagtgatgtatggtcctatggtgtgttactatgggagattgttagcttaggaggcacaccctactgcgggatgacttgtgcagaactctacgagaagctgccccagggctacagactggagaagcccctgaactgtgatgatgaggtgtatgatctaatgagacaatgctggcgggagaagccttatgagaggccatcatttgcccagatattggtgtccttaaacagaatgttagaggagcgaaagacctacgtgaataccacgctttatgagaagtttacttatgcaggaattgactgttctgctgaagaagcggcctaggacagaacatctgtataccctctgtttccctttcactggcatgggagacccttgacacctgctgagaaaacatgcctctgccaaaggatgtgatatataagtgtacatatgtgctggaattctaacaagtcataggttaatatttaagacactgaaaaatctaagtgatataaatcagattcttctctctcaattttatccctcacctgtagcagccagtcccgtttcatttagtcatgtgaccactctgtcttgtgtttccacagcctgcaagtcagtccaggatgctaacatctaaaaatagacttaaatctcattgcttacaagcctaagaatctttagagaagtatacataagtttaggataaaataatgggattttcttttcttttctctggtaatattgacttgtatattttaagaaataacagaaagcctgggtgacatttgggagacatgtgacatttatatattgaattaatatccctacatgtattgcacattgtaaaaagttttagttttgatgagttgtgagtttaccttgtatactgtaggcacactttgcactgatatatcatgagtgaataaatgtcttgcctactc

SEQ ID NO: 191 - DNA, 4176 bp, Homo sapiens
gacgcgggcgcggaaggagcgcggccggaggtcctcaggaagaagccgcggggactggctgcgcttgacaggctgcacttggatgggagcacctggtgcctcgggactgctccgatgcccgggtctgtgctgaatgtgtaatatgcggaactatattgaaacattacaaccatcttttgatggcaacaccctgaggacctcccttttccagatggggaaactgaggcccagaattgctaagtggcttgcttgagttgacacagggagctccaggactcaccctcagctgagccacctgccgggagcatgcctctgcgccactgggggatggccaggggcagtaagcccgttggggatggagcccagcccatggctgccatgggaggcctgaaggtgcttctgcactgggctggtccaggcggcggggagccctgggtcactttcagtgagtcatcgctgacagctgaggaagtctgcatccacattgcacataaagttggtatcactcctccttgcttcaatctctttgccctcttcgatgctcaggcccaagtctggttgcccccaaaccacatcctagagatccccagagatgcaagcctgatgctatatttccgcataaggttttatttccggaactggcatggcatgaatcctcgggaaccggctgtgtaccgttgtgggcccccaggaaccgaggcatcctcagatcagacagcacaggggatgcaactcctggacccagcctcatttgagtacctctttgagcagggcaagcatgagtttgtgaatgacgtggcatcactgtgggagctgtcgaccgaggaggagatccaccactttaagaatgagagcctgggcatggcctttctgcacctctgtcacctcgctctccgccatggcatccccctggaggaggtggccaagaagaccagcttcaaggactgcatcccgcgctccttccgccggcatatccggcagcacagcgccctgacccggctgcgccttcggaacgtcttccgcaggttcctgcgggacttccagccgggccgactctcccagcagatggtcatggtcaaatacctagccacactcgagcggctggcaccccgcttcggcacagagcgtgtgcccgtgtgccacctgaggctgctggcccaggccgagggggagccctgctacatccgggacagtggggtggcccctacagaccctggccctgagtctgctgctgggcccccaacccacgaggtgctggtgacaggcactggtggcatccagtggtggccagtagaggaggaggtgaacaaggaggagggttctagtggcagcagtggcaggaacccccaagccagcctgtttgggaagaaggccaaggctcacaaggcattcggccagccggcagacaggccgcgggagccactgtgggcctacttctgtgacttccgggacatcacccacgtggtgctgaaagagcactgtgtcagcatccaccggcaggacaacaagtgcctggagctgagcttgccttcccgggctgcggcgctgtccttcgtgtcgctggtggacggctatttccgcctgacggccgactccagccactacctgtgccacgaggtggctcccccacggctggtgatgagcatccgggatgggatccacggacccctgctggagccatttgtgcaggccaagctgcggcccgaggacggcctgtacctcattcactggagcaccagccacccctaccgcctgatcctcacagtggcccagcgtagccaggcaccagacggcatgcagagcttgcggctccgaaagttccccattgagcagcaggacggggccttcgtgctggagggctggggccggtccttccccagcgttcgggaacttggggctgccttgcagggctgcttgctgagggccggggatgactgcttctctctgcgtcgctgttgcctgccccaaccaggagaaacctccaatctcatcatcatgcggggggctcgggccagccccaggacactcaacctcagccagctcagcttccaccgggttgaccagaaggagatcacccagctgtcccacttgggccagggcacaaggaccaacgtgtatgagggccgcctgcgagtggagggcagcggggaccctgaggagggcaagatggatgacgaggaccccctcgtgcctggcagggaccgtgggcaggagctacgagtggtgctcaaagtgctggaccctagtcaccatgacatcgccctggccttctacgagacagccagcctcatgagccaggtctcccacacgcacctggccttcgtgcatggcgtctgtgtgcgcggccctgaaaatagcatggtgacagagtacgtggagcacggacccctggatgtgtggctgcggagggagcggggccatgtgcccatggcttggaagatggtggtggcccagcagctggccagcgccctcagctacctggagaacaagaacctggttcatggtaatgtgtgtggccggaacatcctgctggcccggctggggttggcagagggcaccagccccttcatcaagctgagtgatcctggcgtgggcctgggcgccctctccagggaggagcgggtggagaggatcccctggctggcccccgaatgcctaccaggtggggccaacagcctaagcaccgccatggacaagtgggggtttggcgccaccctcctggagatctgctttgacggagaggcccctctgcagagccgcagtccctccgagaaggagcatttctaccagaggcagcaccggctgcccgagccctcctgcccacagctggccacactcaccagccagtgtctgacctatgagccaacccagaggccatcattccgcaccatcctgcgtgacctcacccgcgtgcagccccacaatcttgctgacgtcttgactgtgaaccgggactcaccggccgtcggacctactactttccacaagcgctatttgaaaaagatccgagatctgggcgagggtcacttcggcaaggtcagcttgtactgctacgatccgaccaacgacggcactggcgagatggtggcggtgaaagccctcaaggcagactgcggcccccagcaccgctcgggctggaagcaggagattgacattctgcgcacgctctaccacgagcacatcatcaagtacaagggctgctgcgaggaccaaggcgagaagtcgctgcagctggtcatggagtacgtgcccctgggcagcctccgagactacctgccccggcacagcatcgggctggcccagctgctgctcttcgcccagcagatctgcgagggcatggcctatctgcacgcgcacgactacatccaccgagacctagccgcgcgcaacgtgctgctggacaacgacaggctggtcaagatcggggactttggcctagccaaggccgtgcccgaaggccacgagtactaccgcgtgcgcgaggatggggacagccccgtgttctggtatgccccagagtgcctgaaggagtataagttctactatgcgtcagatgtctggtccttcggggtgaccctgtatgagctgctgacgcactgtgactccagccagagcccccccacgaaattccttgagctcataggcattgctcagggtcagatgacagttctgagactcactgagttgctggaacgaggggagaggctgccacggcccgacaaatgtccctgtgaggtctatcatctcatgaagaactgctgggagacagaggcgtcctttcgcccaaccttcgagaacctcatacccattctgaagacagtccatgagaagtaccaaggccaggccccttcagtgttcagcgtgtgctgaggcacaatggcagccctgcctgggaggactggaccaggcagtggctgcagagggagcctcctgctccctgctccaggatgaaaccaagagggggatgtcagcctcacccacaccgtgtgccttactcctgtctagagaccccacctctgtgaacttatttttctttcttggccgtgagcctaaccatgatcttgagggacccaacatttgtaggggcactaatccagcccttaaatcccccagcttccaaacttgaggcccaccatctccaccatctggtaataaactcatgttttctctgctggg

SEQ ID NO: 192 - DNA, 3131 bp, Homo sapiens
cgagccgtgcggccagagcgggaaagagactcgtctttgcgtccgagttctggagccgccgcaccccgactcctggggccgcggcagcggctgcgaggggacgggcgtccgctgtctcctgggttcccctcgtagcgacccgcgggatcggaaaaaaaggagaagatggaggaggagggtggcagcagcggcggcgccgcggggaccagcgcggacggcggcgacggaggagagcagctcctcactgtcaagcacgagctgcggactgctaatttgacaggacatgctgagaaggtgggaatagaaaattttgagctcctgaaggtcctaggaactggagcttatggaaaagtatttctagttcgtaaaataagtggccatgatactggaaagctgtatgccatgaaagttttgaaaaaggcaacaatcgttcaaaaggccaaaaccacagagcatacaaggacagaacgacaagtcctggaacacattaggcagtcgccatttttggtaacattacattatgctttccagacagaaaccaaacttcatctcattttagattatataaatggtggtgaactttttactcatctttctcaaagagagcgtttcacagagcatgaggtgcagatttatgttggagagattgtgcttgccctcgaacatctccacaagttggggattatatatcgtgatattaagcttgagaatattctacttgattctaatggccatgtggtgctgacagattttggtctgagtaaggagtttgtggctgatgaaactgaaagagcatattccttttgtggaactattgaatacatggcaccagatattgtcagagggggagattcaggacatgacaaggcagttgactggtggagtttgggtgttctaatgtatgaattactaactggagcatctcctttcactgttgatggagaaaaaaattcccaagctgagatatctaggagaatattaaaaagtgagcctccatatccccaagaaatgagtgctttagcgaaagacctaattcagcgtcttttgatgaaagatcccaagaagagattgggatgtggtccacgtgatgcagatgaaatcaaagaacatctcttctttcagaaaataaattgggatgatttagccgccaaaaaagtgcctgcaccatttaagccagtcattcgagatgaattagatgtgagtaactttgcagaagagttcacagaaatggatcccacttattctcccgcagccctgccccagagttctgagaagctgtttcagggctattcctttgttgctccttccatcctattcaagcgtaatgcagctgtcatagaccctcttcagtttcacatgggagttgaacgtcctggagtgacaaatgttgccaggagtgcaatgatgaaggactctccattctatcaacactatgacctagatttgaaggacaaacccctgggagaaggtagtttttcaatttgtcgaaagtgtgtgcataaaaaaagtaaccaagcttttgcagtcaaaataatcagcaaaaggatggaagccaatactcaaaaggaaataacagctctgaaactctgtgaaggacaccccaatattgtgaagttgcatgaagtttttcatgatcagcttcacacgtttctagtgatggaacttctgaatggaggagaactgtttgagcgcattaagaaaaagaagcacttcagtgagacggaagccagctacatcatgaggaagcttgtttcagctgtaagccacatgcatgatgttggagtggtgcacagggatctgaaacctgagaatttattgttcaccgatgaaaatgacaatttggaaattaaaataattgattttggatttgcacggctaaagccaccggataatcagcccctgaagactccatgcttcacccttcattatgccgccccagagctcttgaatcagaacggctacgatgagtcctgtgacctgtggagcttgggcgtcattttgtacacaatgttgtcaggacaggttcccttccaatctcatgaccgaagtttgacgtgtaccagcgcggtggaaatcatgaagaaaattaaaaagggagatttctcctttgaaggagaagcctggaagaatgtatcccaagaggctaaagatttgatccaaggacttctcacagtagatccaaacaaaaggcttaaaatgtctggcttgaggtacaatgaatggctacaagatggaagtcagctgtcctccaatcctctgatgactccggatattctaggatcttccggagctgccgtgcatacctgtgtgaaagcaaccttccacgcctttaacaaatacaagagagaggggttttgccttcagaatgttgataaggcccctttggctaagagaagaaaaatgaaaaagactagcaccagtaccgagacgcgcagcagttccagtgagagttcccattcttcttcctctcattctcacggtaaaactacacccaccaagacactgcagcccagcaatcctgccgacagcaataacccggagaccctcttccagttctcggactcagtagcttaggcatggtaggagtgtatcagtgatccattgcacctttattccctcagcatatgcctgaggcgatcttttatgcttttaaaaatgtttcccgttggtctcattggaatctgcctcctaatgattttttttcaggaaaacctgtttggttatcctcattcaaaagcactggacagagaatgttactgtgaatagagcacatattactctttttagcaacctagcatgatgccaacaagactatttttgaaagagcaaaggttcctgtaaatttaattagggctagatttgagctgcttgtaagtcacaggttttccagatgtctgccaacaagaaatgactcatactgtgatgataccttttgctttgccttgtggacaatgtgggtttttgaaatttgcacccttcaaacaatgatttatcagagaaaggggtctgttttcaaaaaagattctgtaatgaattttatgtgtggcatatacttatttcttgagagaagattttaacttattgtttttattttatggttacatatgatgataacctgctattattaaact

SEQ ID NO: 193 - DNA, 3131 bp, Homo sapiens; identical to SEQ ID NO: 192

SEQ ID NO: 194 - DNA, 2071 bp, Homo sapiens
gtaaaggcctccgtgttccgtttcctgccgccctcctccgtagccttgcctagtgtaggagccccgaggcctccgtcctcttcccagaggtgtcggggcttggccccagcctccatcttcgtctctcaggatggcgagtagcagcggctccaaggctgaattcattgtcggagggaaatataaactggtacggaagatcgggtctggctccttcggggacatctatttggcgatcaacatcaccaacggcgaggaagtggcagtgaagctagaatctcagaaggccaggcatccccagttgctgtacgagagcaagctctataagattcttcaaggtggggttggcatcccccacatacggtggtatggtcaggaaaaagactacaatgtactagtcatggatcttctgggacctagcctcgaagacctcttcaatttctgttcaagaaggttcacaatgaaaactgtacttatgttagctgaccagatgatcagtagaattgaatatgtgcatacaaagaattttatacacagagacattaaaccagataacttcctaatgggtattgggcgtcactgtaataagttattccttattgattttggtttggccaaaaagtacagagacaacaggacaaggcaacacataccatacagagaagataaaaacctcactggcactgcccgatatgctagcatcaatgcacatcttggtattgagcagagtcgccgagatgacatggaatcattaggatatgttttgatgtattttaatagaaccagcctgccatggcaagggctaaaggctgcaacaaagaaaaaaaaatatgaaaagattagtgaaaagaagatgtccacgcctgttgaagttttatgtaaggggtttcctgcagaatttgcgatgtacttaaactattgtcgtgggctacgctttgaggaagccccagattacatgtatctgaggcagctattccgcattcttttcaggaccctgaaccatcaatatgactacacatttgattggacaatgttaaagcagaaagcagcacagcaggcagcctcttccagtgggcagggtcagcaggcccaaacccccacaggcaagcaaactgacaaaaccaagagtaacatgaaaggtttctaagcatgaattgaggaacagaagaagcagagcagatgatcggagcagcatttgtttctccccaaatctagaaattttagttcatatgtacactagccagtggttgtggacaaccatttacttggtgtaaagaacttaatttcagtataaactgactctgggcagcattggtgatgctgtatcctgagttgtagcctctgtaattgtgaatattaactgagatagtgaaacatggtgtccggttttctattgcattttttcaagtggaaaagttaactaaatggttgacacacaaaaattggtggagaaattgtgcatatgccaatttttttgttaaaaccttttgttttgaactatactgctttgagatctcatttcagaagaacggcatgaacagtcttcagccacagttgtgatggttgttaaatgctcacaattgtgcattcttagggtttttccatccctggggtttgcaagttgttcacttaaaacattcttaaaatggttggcttcttgtctgcaagccagctgatatggtagcaaccaaagattccagtgtttgagcatatgaaagactctgcctgcttaattgtgctagaaataacagcatctaaagtgaagacttaagaaaaacttagtgactactagattatccttaggactctgcattaactctataatgttcttggtattaaaaaaaaagcatatttgtcacagaaatttagttaacatcttacaactgaacatgtatgtatgttgcttagataaatgtaatcactgtaaacatctatatgatctgggattttgtttttattttgaaatgggagcttttttgtttacaagttcattaaaaactaaaaactgtttctgtaaaaaaaaaaaaaaaaaaaaaaaaaaaaaaaaaaaaaaaaaaaaaaaaaaaaaaaaaaa

SEQ ID NO: 195 - DNA, 1399 bp, Homo sapiens
gaattccggcctggcaaaaagaaacctgactgagcggcggtgatcaggttcccctctgctgattctgggccccgaaccccggtaaaggcctccgtgttccgtttcctgccgccctcctccgtagccttgcctagtgtaggagccccgaggcctccgtcctcttcccagaggtgtcggggcttggccccagcctccatcttcgtctctcaggatggcgagtagcagcggctccaaggctgaattcattgtcggagggaaatataaactggtacggaagatcgggtctggctccttcggggacatctatttggcgatcaacatcaccaacggcgaggaagtggcagtgaagctagaatctcagaaggccaggcatccccagttgctgtacgagagcaagctctataagattcttcaaggtggggttggcatcccccacatacggtggtatggtcaggaaaaagactacaatgtactagtcatggatcttctgggacctagcctcgaagacctcttcaatttctgttcaagaaggttcacaatgaaaactgtacttatgttagctgaccagatgatcagtagaattgaatatgtgcatacaaagaattttatacacagagacattaaaccagataacttcctaatgggtattgggcgtcactgtaataagttattccttattgattttggtttggccaaaaagtacagagacaacaggacaaggcaacacataccatacagagaagataaaaacctcactggcactgcccgatatgctagcatcaatgcacatcttggtattgagcagagtcgccgagatgacatggaatcattaggatatgttttgatgtattttaatagaaccagcctgccatggcaagggctaaaggctgcaacaaagaaacaaaaatatgaaaagattagtgaaaagaagatgtccacgcctgttgaagttttatgtaaggggtttcctgcagaatttgcgatgtacttaaactattgtcgtgggctacgctttgaggaagccccagattacatgtatctgaggcagctattccgcattcttttcaggaccctgaaccatcaatatgactacacatttgattggacaatgttaaagcagaaagcagcacagcaggcagcctcttccagtgggcagggtcagcaggcccaaacccccacaggcaagcaaactgacaaaaccaagagtaacatgaaaggtttctaagcatgaattgaggaacagaagaagcagagcagatgatcggagcagcatttgtttctccccaaatctagaaattttagttcatatgtacactagccagtggttgtggacaaccatttacttggtgtaaagaacttaatttcagtataaactgactctgggcagcaaaaggaattc

SEQ ID NO: 196 - DNA, 2063 bp, Homo sapiens; identical to SEQ ID NO: 189

SEQ ID NO: 197 - DNA, 4125 bp, Homo sapiens; identical to SEQ ID NO: 190

SEQ ID NO: 198 - DNA, 1702 bp, Homo sapiens
ggcacgagcgcaggagacacaggcgctggctgccccgtccgctctccgcctccgccgcgccctcctcgcccgggatgggcccccccgccgccgccggatccctcgcctcccggccgccgccgttgcgctcgccgcgctcgcactgaagcccgggccctcgcgcgccgcggttcgccccgcagcctcgccccctgcccacccgggcggccgtagggcggtcacgatgctgccgcccttaccctcccgcctcgggctgctgctgctgctgctcctgtgcccggcgcacgtcggcggactgtggtgggctgtgggcagccccttggttatggaccctaccagcatctgcaggaaggcacggcggctggccgggcggcaggccgagttgtgccaggctgagccggaagtggtggcagagctagctcggggcgcccggctcggggtgcgagagtgccagttccagttccgcttccgccgctggaattgctccagccacagcaaggcctttggacgcatcctgcaacaggacattcgggagacggccttcgtgttcgccatcactgcggccggcgccagccacgccgtcacgcaggcctgttctatgggcgagctgctgcagtgcggctgccaggcgccccgcgggcgggcccctccccggccctccggcctgcccggcacccccggaccccctggccccgcgggctccccggaaggcagcgccgcctgggagtggggaggctgcggcgacgacgtggacttcggggacgagaagtcgaggctctttatggacgcgcggcacaagcggggacgcggagacatccgcgcgttggtgcaactgcacaacaacgaggcgggcaggctggccgtgcggagccacacgcgcaccgagtgcaaatgccacgggctgtcgggatcatgcgcgctgcgcacctgctggcagaagctgcctccatttcgcgaggtgggcgcgcggctgctggagcgcttccacggcgcctcacgcgtcatgggcaccaacgacggcaaggccctgctgcccgccgtccgcacgctcaagccgccgggccgagcggacctcctctacgccgccgattcgcccgacttttgcgcccccaaccgacgcaccggctcccccggcacgcgcggtcgcgcctgcaatagcagcgccccggacctcagcggctgcgacctgctgtgctgcggccgcgggcaccgccaggagagcgtgcagctcgaagagaactgcctgtgccgcttccactggtgctgcgtagtacagtgccaccgttgccgtgtgcgcaaggagctcagcctctgcctgtgacccgccgcccggccgctagactgacttcgcgcagcggtggctcgcacctgtgggacctcagggcaccggcaccgggcgcctctcgccgctcgagcccagcctctccctgccaaagcccaactcccagggctctggaaatggtgaggcgaggggcttgagaggaacgcccacccacgaaggcccagggcgccagacggccccgaaaaggcgctcggggagcgtttaaaggacactgtacaggccctccctccccttggcctctaggaggaaacagttttttagactggaaaaaagccagtctaaaggcctctggatactgggctccccagaactgctggccacaggatggtgggtgaggttagtatcaataaagatatttaa

SEQ ID NO: 199 - DNA, 1452 bp, Homo sapiens
tcacgatgctgccgcccttaccctcccgcctcgggctgctgctgctgctgctcctgtgcccggcgcacgtcggcggactgtggtgggctgtgggcagccccttggttatggaccctaccagcatctgcaggaaggcacggcggctggccgggcggcaggccgagttgtgccaggctgagccggaagtggtggcagagctagctcggggcgcccggctcggggtgcgagagtgccagttccagttccgcttccgccgctggaattgctccagccacagcaaggcctttggacgcatcctgcaacaggacattcgggagacggccttcgtgttcgccatcactgcggccggcgccagccacgccgtcacgcaggcctgttctatgggcgagctgctgcagtgcggctgccaggcgccccgcgggcgggcccctccccggccctccggcctgcccggcacccccggaccccctggccccgcgggctccccggaaggcagcgccgcctgggagtggggaggctgcggcgacgacgtggacttcggggacgagaagtcgaggctctttatggacgcgcggcacaagcggggacgcggagacatccgcgcgttggtgcaactgcacaacaacgaggcgggcaggctggccgtgcggagccacacgcgcaccgagtgcaaatgccacgggctgtcgggatcatgcgcgctgcgcacctgctggcagaagctgcctccatttcgcgaggtgggcgcgcggctgctggagcgcttccacggcgcctcacgcgtcatgggcaccaacgacggcaaggccctgctgcccgccgtccgcacgctcaagccgccgggccgagcggacctcctctacgccgccgattcgcccgacttttgcgcccccaaccgacgcaccggctcccccggcacgcgcggtcgcgcctgcaatagcagcgccccggacctcagcggctgcgacctgctgtgctgcggccgcgggcaccgccaggagagcgtgcagctcgaagagaactgcctgtgccgcttccactggtgctgcgtagtacagtgccaccgttgccgtgtgcgcaaggagctcagcctctgcctgtgacccgccgcccggccgctagactgacttcgcgcagcggtggctcgcacctgtgggacctcagggcaccggcaccgggcgcctctcgccgctcgagcccagcctctccctgccaaagcccaactcccagggctctggaaatggtgaggcgaggggcttgagaggaacgcccacccacgaaggcccagggcgccagacggccccgaaaaggcgctcggggagcgtttaaaggacactgtacaggccctccctccccttggcctctaggaggaaacagttttttagactggaaaaaagccagtctaaaggcctctggatactgggctccccagaactgctggccacaggatgg

SEQ ID NO: 200 - DNA, 2385 bp, Homo sapiens
aaacccactccaccttactaccagacaaccttagccaaaccatttacccaaataaagtataggcgatagaaattgaaacctggcgcaatagatatagtaccgcaagggaaagatgaaaaattataaccaagcataatatagcaaggactaacccctataccttctgcataatgaattaactagaaataactttgcaaggagagtcaaagctaaggcccccgaaaccaggcgagctacctaagaacagctaaaagagcacacccgtctatgtagcaaaatagtgggaagatttataggtagaggcgacaaacctaccgagcctggtgatagctggttgtccaagatagaatcttagttcaactttaaatttgcccacagaaccctctaaatccccttgtaaatttaactgttagtccaaagaggaacagctctttggacactaggaaaaaaccttgtagagagagtgtcagcccaattccacacttttccacatgttggatggccttggagtggtagccataagcatttttggaattcaactaaaaactgaaggatccttgaggacggcagtacctggcatacctacacagtcagcgttcaacaagtgtttgcaaaggtacattggggcactgggggcacgagtgatctgtgacaatatccctggtttggtgagccggcagcggcagctgtgccagcgttacccagacatcatgcgttcagtgggcgagggtgcccgagaatggatccgagagtgtcagcaccaattccgccaccaccgctggaactgtaccaccctggaccgggaccacaccgtctttggccgtgtcatgctcagaagtagccgagaggcagcttttgtatatgccatctcatcagcaggggtgatccacgctattactcgcgcctgtagccagggtgaactgagtgtgtgcagctgtgacccctacacccgtggccgacaccatgaccagcgtgggacttttgactggggtggctgcagtgacaacatccactacggtgtccgttttgccaaggccttcgtggatgccaaggagaagaggcttaaggatgcccgggccctcatgaacttacataataaccgctgtggtcgcacggctgtgcggcggtttgtcaagctggagtgtaagtgccatggcgtgagtggttcctgtactctgcgcacctgctggcgtgcactctcagatttccgccgcacaggtgattacctgcggcgacgctatgatggggctgtgcaggtgatggccacccaagatggtgccaacttcaccgcagcccgccaaggctatcgccgtgccacccggagtgatcttgtctactttgacaactctccagattactgtgtcttggacaaggctgcaggttccctaggcactgcaggccgtgtctgcagcaagacatcaaaaggaacagacggttgtgaaatcatgtgctgtggccgagggtacgacacaactcgagtcacccgtgttacccagtgtgagtgcaaattccactggtgctgtgctgtacggtgcaaggaatgcagaaatactgtggacgtccatacttgcaaagcccccaagaaggcagagtggctggaccagacctgaacacacagatacctcactcatccctccaattcaagcctctcaactcaaaagcacaagatccttgcatgcacaccttcctccaccctccaccctgggctgctaccgcttctatttaaggatgtagagagtaatccatagggaccatggtgtcctggctggttccttagccctgggaaggagttgtcaggggatataagaaactgtgcaagctccctgatttcccgctctggagatttgaagggagagtagaagagatagggggtctttagagtgaaatgagttgcactaaagtacgtagttgaggctccttttttctttcctttgcaccagcttcccgacacttcttggtgtgcaagaggaagggtacctgtagagagcttctttttgtttctacctggccaaagttagatgggacaaagatgaatggcatgtcccttctctgaagtccgtttgagcagaactacctggtaccccgaaagaaaaatcttaggctaccacattctattattgagagcctgagatgttagccatagtggacaaggttccattcacatgctcatatgtttataaactgtgttttgtagaagaaaaagaatcataacaatacaaacacacattcattctctctttttctctctaccattctcaacctgtattggacagcactgcctcttttgcttacttgctgcctgttcaaactgaggtggaatgcagtggttcccatgcttaacagatcattaaaacaccctagaacactcctaggatagattaatgt

SEQ ID NO: 201 - DNA, 1751 bp, Homo sapiens
ggcagaggaggagggagggagggaaggagcgcggagcccggcccggaagctaggtgagtgtggcatccgagctgagggacgcgagcctgagacgccgctgctgctccggctgagtatctagcttgtctccccgatgggattcccgtccaagctatctcgagcctgcagcgccacagtccccggccctcgcccaggttcactgcaaccgttcagaggtccccaggagctgctgctggcgagcccgctactgcagggacctatggagccattccgtagtgccatcccgagcaacgcactgctgcagcttccctgagcctttccagcaagtttgttcaagattggctgtcaagaatcatggactgttattatatgccttgttttctgtcaagacaccatgattcctggtaaccgaatgctgatggtcgttttattatgccaagtcctgctaggaggcgcgagccatgctagtttgatacctgagacggggaagaaaaaagtcgccgagattcagggccacgcgggaggacgccgctcagggcagagccatgagctcctgcgggacttcgaggcgacacttctgcagatgtttgggctgcgccgccgcccgcagcctagcaagagtgccgtcattccggactacatgcgggatctttaccggcttcagtctggggaggaggaggaagagcagatccacagcactggtcttgagtatcctgagcgcccggccagccgggccaacaccgtgaggagcttccaccacgaagaacatctggagaacatcccagggaccagtgaaaactctgcttttcgtttcctctttaacctcagcagcatccctgagaacgaggtgatctcctctgcagagcttcggctcttccgggagcaggtggaccagggccctgattgggaaaggggcttccaccgtataaacatttatgaggttatgaagcccccagcagaagtggtgcctgggcacctcatcacacgactactggacacgagactggtccaccacaatgtgacacggtgggaaacttttgatgtgagccctgcggtccttcgctggacccgggagaagcagccaaactatgggctagccattgaggtgactcacctccatcagactcggacccaccagggccagcatgtcaggattagccgatcgttacctcaagggagtgggaattgggcccagctccggcccctcctggtcacctttggccatgatggccggggccatgccttgacccgacgccggagggccaagcgtagccctaagcatcactcacagcgggccaggaagaagaataagaactgccggcgccactcgctctatgtggacttcagcgatgtgggctggaatgactggattgtggccccaccaggctaccaggccttctactgccatggggactgcccctttccactggctgaccacctcaactcaaccaaccatgccattgtgcagaccctggtcaattctgtcaattccagtatccccaaagcctgttgtgtgcccactgaactgagtgccatctccatgctgtacctggatgagtatgataaggtggtactgaaaaattatcaggagatggtagtagagggatgtgggtgccgctgagatcaggcagtccttgaggatagacagatatacacaccacacacacacaccacatacaccacacacacacgttcccatccactcacccacacactacacagactgcttccttatagctggacttttattt

SEQ ID NO: 202 - DNA, 2003 bp, Homo sapiens
tccggcaacgccaaccgctccgctgcgcgcaggctgggctgcaggctctcggctgcagcgctgggctggtgtgcagtggtgcgaccacggctcacggcagcctcagccacccagatgtaagcgatctggttcccacctcagcctcccgagtagtggatctaggatccggcttccaacatgtggcagctctgggcctccctctgctgcctgctggtgttggccaatgcccggagcaggccctctttccatcccctgtcggatgagctggtcaactatgtcaacaaacggaataccacgtggcaggccgggcacaacttctacaacgtggacatgagctacttgaagaggctatgtggtaccttcctgggtgggcccaagccaccccagagagttatgtttaccgaggacctgaagctgcctgcaagcttcgatgcacgggaacaatggccacagtgtcccaccatcaaagagatcagagaccagggctcctgtggctcctgctgggccttcggggctgtggaagccatctctgaccggatctgcatccacaccaatgcgcacgtcagcgtggaggtgtcggcggaggacctgctcacatgctgtggcagcatgtgtggggacggctgtaatggtggctatcctgctgaagcttggaacttctggacaagaaaaggcctggtttctggtggcctctatgaatcccatgtagggtgcagaccgtactccatccctccctgtgagcaccacgtcaacggctcccggcccccatgcacgggggagggagatacccccaagtgtagcaagatctgtgagcctggctacagcccgacctacaaacaggacaagcactacggatacaattcctacagcgtctccaatagcgagaaggacatcatggccgagatctacaaaaacggccccgtggagggagctttctctgtgtattcggacttcctgctctacaagtcaggagtgtaccaacacgtcaccggagagatgatgggtggccatgccatccgcatcctgggctggggagtggagaatggcacaccctactggctggttgccaactcctggaacactgactggggtgacaatggcttctttaaaatactcagaggacaggatcactgtggaatcgaatcagaagtggtggctggaattccacgcaccgatcagtactgggaaaagatctaatctgccgtgggcctgtcgtgccagtcctgggggcgagatcggggtagaaatgcattttattctttaagttcacgtaagatacaagtttcagacagggtctgaaggactggattggccaaacatcagacctgtcttccaaggagaccaagtcctggctacatcccagcctgtggttacagtgcagacaggccatgtgagccaccgctgccagcacagagcgtccttccccctgtagactagtgccgtagggagtacctgctgccccagctgactgtggccccctccgtgatccatccatctccagggagcaagacagagacgcaggaatggaaagcggagttcctaacaggatgaaagttcccccatcagttcccccagtacctccaagcaagtagctttccacatttgtcacagaaatcagaggagagacggtgttgggagccctttggagaacgccagtctcccaggccccctgcatctatcgagtttgcaatgtcacaacctctctgatcttgtgctcagcatgattctttaatagaagttttattttttcgtgcactctgctaatcatgtgggtgagccagtggaacagcgggagacctgtgctagttttacagattgcctccttatgacgcggctcaaaaggaaaccaagtggtcaggagttgtttctgacccactgatctctactaccacaaggaaaatagtttaggagaaaccagcttttactgtttttgaaaaattacagcttcaccctgtcaagttaacaaggaatgcctgtgccaataaaagttttctccaacttga

SEQ ID NO: 203 - DNA, 857 bp, Homo sapiens
caggaaagatgcagccactcctgcttctgctggcctttctcctacccactggggctgaggcaggggagatcatcggaggccgggagagcaggccccactcccgcccctacatggcgtatcttcagatccagagtccagcaggtcagagcagatgtggagggttcctggtgcgagaagactttgtgctgacagcagctcattgctggggaagcaatataaatgtcaccctgggcgcccacaatatccagagacgggaaaacacccagcaacacatcactgcgcgcagagccatccgccaccctcaatataatcagcggaccatccagaatgacatcatgttattgcagctgagcagaagagtcagacggaatcgaaacgtgaacccagtggctctgcctagagcccaggagggactgagacccgggacgctgtgcactgtggccggctggggcagggtcagcatgaggaggggaacagatacactccgagaggtgcagctgagagtgcagagggataggcagtgcctccgcatcttcggttcctacgacccccgaaggcagatttgtgtgggggaccggcgggaacggaaggctgccttcaagggggattccggaggccccctgctgtgtaacaatgtggcccacggcatcgtctcctatggaaagtcgtcaggggttcctccagaagtcttcaccagggtctcaagtttcctgccctggataaggacaacaatgagaagcttcaaactgctggatcagatggagacccccctgtgactgactcttcttctcggggacacaggccagctccacagtgttgccagagccttaataaacgtccacagagtataaataacc

SEQ ID NO: 204 - DNA, 1702 bp, Homo sapiens
aaattttccagccgatcactggagctgacttccgcaatcccgatggaataaatctagcacccctgatggtgtgcccacactttgctgccgaaacgaagccagacaacagatttccatcagcaggatgtgggggctcaaggttctgctgctacctgtggtgagctttgctctgtaccctgaggagatactggacacccactgggagctatggaagaagacccacaggaagcaatataacaacaaggtggatgaaatctctcggcgtttaatttgggaaaaaaacctgaagtatatttccatccataaccttgaggcttctcttggtgtccatacatatgaactggctatgaaccacctgggggacatgaccagtgaagaggtggttcagaagatgactggactcaaagtacccctgtctcattcccgcagtaatgacaccctttatatcccagaatgggaaggtagagccccagactctgtcgactatcgaaagaaaggatatgttactcctgtcaaaaatcagggtcagtgtggttcctgttgggcttttagctctgtgggtgccctggagggccaactcaagaagaaaactggcaaactcttaaatctgagtccccagaacctagtggattgtgtgtctgagaatgatggctgtggagggggctacatgaccaatgccttccaatatgtgcagaagaaccggggtattgactctgaagatgcctacccatatgtgggacaggaagagagttgtatgtacaacccaacaggcaaggcagctaaatgcagagggtacagagagatccccgaggggaatgagaaagccctgaagagggcagtggcccgagtgggacctgtctctgtggccattgatgcaagcctgacctccttccagttttacagcaaaggtgtgtattatgatgaaagctgcaatagcgataatctgaaccatgcggttttggcagtgggatatggaatccagaagggaaacaagcactggataattaaaaacagctggggagaaaactggggaaacaaaggatatatcctcatggctcgaaataagaacaacgcctgtggcattgccaacctggccagcttccccaagatgtgactccagccagccaaatccatcctgctcttccatttcttccacgatggtgcagtgtaacgatgcactttggaagggagttggtgtgctatttttgaagcagatgtggtgatactgagattgtctgttcagtttccccatttgtttgtgcttcaaatgatccttcctactttgcttctctccacccatgacctttttcactgtggccatcaggactttccctgacagctgtgtactcttaggctaagagatgtgactacagcctgcccctgactgtgttgtcccagggctgatgctgtacaggtacaggctggagattttcacataggttagattctcattcacgggactagttagctttaagcaccctagaggactagggtaatctgacttctcacttcctaagttcccttctatatcctcaaggtagaaatgtctatgttttctactccaattcataaatctattcataagtctttggtacaagtttacatgataaaaagaaatgtgatttgtcttcccttctttgcacttttgaaataaagtatttatctcctgtctacagtttaataaatagcatctagtacacat

SEQ ID NO: 205 - DNA, 1632 bp, Homo sapiens
gccggccgaacccagacccgaggttttagaagcagagtcaggcgaagctgggccagaaccgcgacctccgcaaccttgagcggcatccgtggagtgcgcctgcgcagctacgaccgcagcaggaaagcgccgccggccaggcccagctgtggccggacagggactggaagagaggacgcggtcgagtaggtgtgcaccagccctggcaacgagagcgtctaccccgaactctgctggccttgaggtggggaagccggggagggcagttgaggaccccgcggaggcgcgtgactggttgagcgggcaggccagcctccgagccgggtggacacaggttttaaaacatgaatcctacactcatccttgctgccttttgcctgggaattgcctcagctactctaacatttgatcacagtttagaggcacagtggaccaagtggaaggcgatgcacaacagattatacggcatgaatgaagaaggatggaggagagcagtgtgggagaagaacatgaagatgattgaactgcacaatcaggaatacagggaagggaaacacagcttcacaatggccatgaacgcctttggagacatgaccagtgaagaattcaggcaggtgatgaatggctttcaaaaccgtaagcccaggaaggggaaagtgttccaggaacctctgttttatgaggcccccagatctgtggattggagagagaaaggctacgtgactcctgtgaagaatcagggtcagtgtggttcttgttgggcttttagtgctactggtgctcttgaaggacagatgttccggaaaactgggaggcttatctcactgagtgagcagaatctggtagactgctctgggcctcaaggcaatgaaggctgcaatggtggcctaatggattatgctttccagtatgttcaggataatggaggcctggactctgaggaatcctatccatatgaggcaacagaagaatcctgtaagtacaatcccaagtattctgttgctaatgacaccggctttgtggacatccctaagcaggagaaggccctgatgaaggcagttgcaactgtggggcccatttctgttgctattgatgcaggtcatgagtccttcctgttctataaagaaggcatttattttgagccagactgtagcagtgaagacatggatcatggtgtgctggtggttggctacggatttgaaagcacagaatcagataacaataaatattggctggtgaagaacagctggggtgaagaatggggcatgggtggctacgtaaagatggccaaagaccggagaaaccattgtggaattgcctcagcagccagctaccccactgtgtgagctggtggacggtgatgaggaaggacttgactggggatggcgcatgcatgggaggaattcatcttcagtctaccagcccccgctgtgtcggatacacactcgaatcattgaagatccgagtgtgatttgaattctgtgatattttcacactggtaaatgttacctctattttaattactgctataaataggtttatattattgattcacttactgactttgcattttcgtttttaaaaggatgtataaatttttacctgtttaaataaaatttaatttcaaatgta

SEQ ID NO: 206 - DNA, 1255 bp, Homo sapiens
ctaaagatgaaacggctggtttgtgtgctcttggtgtgctcctctgcagtggcacagttgcataaagatcctaccctggatcaccactggcatctctggaagaaaacctatggcaaacaatacaaggaaaagaatgaagaagcagtacgacgtctcatctgggaaaagaatctaaagtttgtgatgcttcacaacctggagcattcaatgggaatgcactcatacgatctgggcatgaaccacctgggagacatgaccagtgaagaagtgatgtctttgacgagttccctgagagttcccagccagtggcagagaaatatcacatataagtcaaaccctaatcggatattgcctgattctgtggactggagagagaaagggtgtgttactgaagtgaaatatcaaggttcttgtggtgcttgctgggctttcagtgctgtgggggccctggaagcacagctgaagctgaaaacaggaaagctggtgactctcagtgcccagaacctggtggattgctcaactgaaaaatatggaaacaaaggctgcaatggtggcttcatgacaacggctttccagtacatcattgataacaagggcatcgactcagacgcttcctatccctacaaagccatggatcagaaatgtcaatatgactcaaaatatcgtgctgccacatgttcaaagtacactgaacttccttatgggagagaagatgtcctgaaagaagctgtggccaataaaggcccagtgtctgttggtgtagatgcgcgtcatccttctttcttcctctacagaagtggtgtctactatgaaccatcctgtactcagaatgtgaatcatggtgtacttgtggttggctatggtgatcttaatgggaaagaatactggcttgtgaaaaacagctggggccacaactttggtgaagaaggatatattcggatggcaagaaataaaggaaatcattgtgggattgctagctttccctcttacccagaaatctagaggatctctcctttttataacaaatcaagaaatatgaagcactttctcttaacttaatttttcctgctgtatccagaagaaataattgtgtcatgattaatgtgtatttactgtactaatagaaaatatagtttgaggccgggcactgtctggctcacgcctgtaatcccagtacttgggaggccaaggaggcatatcaacttgaggccaggagttaaagagcagcctggctaactgtgaaaccctctctact

SEQ ID NO: 207 - DNA, 1973 bp, Homo sapiens
gggatattggagtagcaagaggctgggaagccatcacttaccttgcactgagaaagaagacaaaggccagtatgcacagctttcctccactgctgctgctgctgttctggggtgtggtgtctcacagcttcccagcgactctagaaacacaagagcaagatgtggacttagtccagaaatacctggaaaaatactacaacctgaagaatgatgggaggcaagttgaaaagcggagaaatagtggcccagtggttgaaaaattgaagcaaatgcaggaattctttgggctgaaagtgactgggaaaccagatgctgaaaccctgaaggtgatgaagcagcccagatgtggagtgcctgatgtggctcagtttgtcctcactgaggggaaccctcgctgggagcaaacacatctgacctacaggattgaaaattacacgccagatttgccaagagcagatgtggaccatgccattgagaaagccttccaactctggagtaatgtcacacctctgacattcaccaaggtctctgagggtcaagcagacatcatgatatcttttgtcaggggagatcatcgggacaactctccttttgatggacctggaggaaatcttgctcatgcttttcaaccaggcccaggtattggaggggatgctcattttgatgaagatgaaaggtggaccaacaatttcagagagtacaacttacatcgtgttgcggctcatgaactcggccattctcttggactctcccattctactgatatcggggctttgatgtaccctagctacaccttcagtggtgatgttcagctagctcaggatgacattgatggcatccaagccatatatggacgttcccaaaatcctgtccagcccatcggcccacaaaccccaaaagcgtgtgacagtaagctaacctttgatgctataactacgattcggggagaagtgatgttctttaaagacagattctacatgcgcacaaatcccttctacccggaagttgagctcaatttcatttctgttttctggccacaactgccaaatgggcttgaagctgcttacgaatttgccgacagagatgaagtccggtttttcaaagggaataagtactgggctgttcagggacagaatgtgctacacggataccccaaggacatctacagctcctttggcttccctagaactgtgaagcatatcgatgctgctctttctgaggaaaacactggaaaaacctacttctttgttgctaacaaatactggaggtatgatgaatataaacgatctatggatccaggttatcccaaaatgatagcacatgactttcctggaattggccacaaagttgatgcagttttcatgaaagatggatttttctatttctttcatggaacaagacaatacaaatttgatcctaaaacgaagagaattttgactctccagaaagctaatagctggttcaactgcaggaaaaattgaacattactaatttgaatggaaaacacatggtgtgagtccaaagaaggtgttttcctgaagaactgtctattttctcagtcatttttaacctctagagtcactgatacacagaatataatcttatttatacctcagtttgcatatttttttactatttagaatgtagccctttttgtactgatataatttagttccacaaatggtgggtacaaaaagtcaagtttgtggcttatggattcatataggccagagttgcaaagatcttttccagagtatgcaactctgacgttgatcccagagagcagcttcagtgacaaacatatcctttcaagacagaaagagacaggagacatgagtctttgccggaggaaaagcagctcaagaacacatgtgcagtcactggtgtcaccctggataggcaagggataactcttctaacacaaaataagtgttttatgtttggaataaagtcaaccttgtttctactgtttt

SEQ ID NO: 208 - DNA, 2321 bp, Homo sapiens
tcaccatgagcctctggcagcccctggtcctggtgctcctggtgctgggctgctgctttgctgcccccagacagcgccagtccacccttgtgctcttccctggagacctgagaaccaatctcaccgacaggcagctggcagaggaatacctgtaccgctatggttacactcgggtggcagagatgcgtggagagtcgaaatctctggggcctgcgctgctgcttctccagaagcaactgtccctgcccgagaccggtgagctggatagcgccacgctgaaggccatgcgaaccccacggtgcggggtcccagacctgggcagattccaaacctttgagggcgacctcaagtggcaccaccacaacatcacctattggatccaaaactactcggaagacttgccgcgggcggtgattgacgacgcctttgcccgcgccttcgcactgtggagcgcggtgacgccgctcaccttcactcgcgtgtacagccgggacgcagacatcgtcatccagtttggtgtcgcggagcacggagacgggtatcccttcgacgggaaggacgggctcctggcacacgcctttcctcctggccccggcattcagggagacgcccatttcgacgatgacgagttgtggtccctgggcaagggcgtcgtggttccaactcggtttggaaacgcagatggcgcggcctgccacttccccttcatcttcgagggccgctcctactctgcctgcaccaccgacggtcgctccgacggcttgccctggtgcagtaccacggccaactacgacaccgacgaccggtttggcttctgccccagcgagagactctacacccaggacggcaatgctgatgggaaaccctgccagtttccattcatcttccaaggccaatcctactccgcctgcaccacggacggtcgctccgacggctaccgctggtgcgccaccaccgccaactacgaccgggacaagctcttcggcttctgcccgacccgagctgactcgacggtgatggggggcaactcggcgggggagctgtgcgtcttccccttcactttcctgggtaaggagtactcgacctgtaccagcgagggccgcggagatgggcgcctctggtgcgctaccacctcgaactttgacagcgacaagaagtggggcttctgcccggaccaaggatacagtttgttcctcgtggcggcgcatgagttcggccacgcgctgggcttagatcattcctcagtgccggaggcgctcatgtaccctatgtaccgcttcactgaggggccccccttgcataaggacgacgtgaatggcatccggcacctctatggtcctcgccctgaacctgagccacggcctccaaccaccaccacaccgcagcccacggctcccccgacggtctgccccaccggaccccccactgtccacccctcagagcgccccacagctggccccacaggtcccccctcagctggccccacaggtccccccactgctggcccttctacggccactactgtgcctttgagtccggtggacgatgcctgcaacgtgaacatcttcgacgccatcgcggagattgggaaccagctgtatttgttcaaggatgggaagtactggcgattctctgagggcagggggagccggccgcagggccccttccttatcgccgacaagtggcccgcgctgccccgcaagctggactcggtctttgaggagcggctctccaagaagcttttcttcttctctgggcgccaggtgtgggtgtacacaggcgcgtcggtgctgggcccgaggcgtctggacaagctgggcctgggagccgacgtggcccaggtgaccggggccctccggagtggcagggggaagatgctgctgttcagcgggcggcgcctctggaggttcgacgtgaaggcgcagatggtggatccccggagcgccagcgaggtggaccggatgttccccggggtgcctttggacacgcacgacgtcttccagtaccgagagaaagcctatttctgccaggaccgcttctactggcgcgtgagttcccggagtgagttgaaccaggtggaccaagtgggctacgtgacctatgacatcctgcagtgccctgaggactagggctcccgtcctgctttggcagtgccatgtaaatccccactgggaccaaccctggggaaggagccagtttgccggatacaaactggtattctgttctggaggaaagggaggagtggaggtgggctgggccctctcttctcacctttgttttttgttggagtgtttctaataaacttggattctctaaccttt

SEQ ID NO: 209 - DNA, 2187 bp, Homo sapiens
cgcccgggcaggtgagaaattggagaagataaaactggacactggggagaccacaacttcatgctgcgtgggatctcccagctacctgcagtggccaccatgtcttgggtcctgctgcctgtactttggctcattgttcaaactcaagcaatagccataaagcaaacacctgaattaacgctccatgaaatagtttgtcctaaaaaacttcacattttacacaaaagagagatcaagaacaaccagacagaaaagcatggcaaagaggaaaggtatgaacctgaagttcaatatcagatgatcttaaatggagaagaaatcattctctccctacaaaaaaccaagcacctcctggggccagactacactgaaacattgtactcacccagaggagaggaaattaccacgaaacctgagaacatggaacactgttactataaaggaaacatcctaaatgaaaagaattctgttgccagcatcagtacttgtgacgggttgagaggatacttcacacatcatcaccaaagataccagataaaacctctgaaaagcacagacgagaaagaacatgccgtctttacatctaaccaggaggaacaagacccagctaaccacacatgtggtgtgaagagcactgacgggaaacaaggcccaattcgaatctctagatcactcaaaagcccagagaaagaagactttcttcgggcacagaaatacattgatctctatttggtgctggataatgccttttataagaactataatgagaatctaactctgataagaagctttgtgtttgatgtgatgaacctactcaatgtgatatataacaccatagatgttcaagtggccttggtaggtatggaaatctggtctgatggggataagataaaggtggtgcccagcgcaagcaccacgtttgacaacttcctgagatggcacagttctaacctggggaaaaagatccacgaccatgctcagcttctcagcgggattagcttcaacaatcgacgtgtgggactggcagcttcaaattccttgtgttccccatcttcggttgctgttattgaggctaaaaaaaagaataatgtggctcttgtaggagtgatgtcacatgagctgggccatgtccttggtatgcctgatgttccattcaacaccaagtgtccctctggcagttgtgtgatgaatcagtatctgagttcaaaattcccaaaggatttcagtacatcttgccgtgcacattttgaaagataccttttatctcagaaaccaaagtgcctgctgcaagcacctattcctacaaatataatgacaacaccagtgtgtgggaaccaccttctagaagtgggagaagactgtgattgtggctctcctaaggagtgtaccaatctctgctgtgaagccctaacgtgtaaactgaagcctggaactgattgcggaggagatgctccaaaccataccacagagtgaatccaaagtctgcttcactgagatgctaccttgccaggacaagaaccaagaactctaactgtcccaggaatcttgtgaattttcacccataatggtctttcacttgtcattctactttctatattgttatcagtccaggaaacaggtaaacagatgtaattagagacattggctctttgtttaggcctaatctttctttttacttttttttttcttttttctttttttttaaagatcatgaatttgtgacttagttctgccctttggagaacaaaagaaagcagtcttccatcaaatcaccttaaaatgcacggctaaactattcagagttaacactccagaattgttaaattacaagtactatgctttaatgcttctttcatcttactagtatggcctataaaaaaaataataccacttgatgggtgaaggctttggcaatagaaagaagaatagaattcaggttttatgttattcctctgtgttcacttcgccttgctcttgaaagtgcagtatttttctacatcatgtcgagaatgattcaatgtaaatatttttcattttatcatgtatatcctatacacacatctccttcatcatcatatatgaagtttattttgagaagtctacattgcttacattttaattgagccagcaaagaaggcttaatgatttattgaaccataatgtcaataaaaacacaacttttgaggc

SEQ ID NO: 210 - DNA, 782 bp, Homo sapiens
aggggccttagcgtgccgcatcgccgagatccagcgcccagagagacaccagagaacccaccatggccccctttgagcccctggcttctggcatcctgttgttgctgtggctgatagcccccagcagggcctgcacctgtgtcccaccccacccacagacggccttctgcaattccgacctcgtcatcagggccaagttcgtggggacaccagaagtcaaccagaccaccttataccagcgttatgagatcaagatgaccaagatgtataaagggttccaagccttaggggatgccgctgacatccggttcgtctacacccccgccatggagagtgtctgcggatacttccacaggtcccacaaccgcagcgaggagtttctcattgctggaaaactgcaggatggactcttgcacatcactacctgcagtttcgtggctccctggaacagcctgagcttagctcagcgccggggcttcaccaagacctacactgttggctgtgaggaatgcacagtgtttccctgtttatccatcccctgcaaactgcagagtggcactcattgcttgtggacggaccagctcctccaaggctctgaaaagggcttccagtcccgtcaccttgcctgcctgcctcgggagccagggctgtgcacctggcagtccctgcggtcccagatagcctgaatcctgcccggagtggaactgaagcctgcacagtgtccaccctgttcccactcccatctttcttccggacaatgaaataaagagttaccacccagc

SEQ ID NO: 211 - DNA, 1075 bp, Homo sapiens
cgcagcaaacacatccgtagaaggcagcgcggccgccgagagccgcagcgccgctcgcccgccgccccccaccccgccgccccgcccggcgaattgcgccccgcgcccctcccctcgcgcccccgagacaaagaggagagaaagtttgcgcggccgagcggggcaggtgaggagggtgagccgcgcgggaggggcccgcctcggccccggctcagcccccgcccgcgcccccagcccgccgccgcgagcagcgcccggaccccccagcggcggcccccgcccgcccagccccccggcccgccatgggcgccgcggcccgcaccctgcggctggcgctcggcctcctgctgctggcgacgctgcttcgcccggccgacgcctgcagctgctccccggtgcacccgcaacaggcgttttgcaatgcagatgtagtgatcagggccaaagcggtcagtgagaaggaagtggactctggaaacgacatttatggcaaccctatcaagaggatccagtatgagatcaagcagataaagatgttcaaagggcctgagaaggatatagagtttatctacacggccccctcctcggcagtgtgtggggtctcgctggacgttggaggaaagaaggaatatctcattgcaggaaaggccgagggggacggcaagatgcacatcaccctctgtgacttcatcgtgccctgggacaccctgagcaccacccagaagaagagcctgaaccacaggtaccagatgggctgcgagtgcaagatcacgcgctgccccatgatcccgtgctacatctcctccccggacgagtgcctctggatggactgggtcacagagaagaacatcaacgggcaccaggccaagttcttcgcctgcatcaagagaagtgacggctcctgtgcgtggtaccgcggcgcggcgccccccaagcaggagtttctcgacatcgaggacccataagcaggcctccaacgcccctgtggccaactgcaaaaaaagcctccaagggtttcgactggtccagctctgacatcccttcctggaaacagcatgaataaaacactcatccc

SEQ ID NO: 212 - DNA, 5487 bp, Homo sapiens
tctgtcgacttgccccagagctgatccttgtctttgtccacttctcagcgaggatggcacttcagggagcccttcccttactatcgcagagagagcaggccctccccagtcatgtccaacccagaactctgttttgttttcttcatagccctagcatcacagaaaatcaccctgtgcattcatggatgtccacgggggcaagggctttgtgttgcttaacccagcatcctgaaccgtgtttgttgaatgaatacagaaccccgtttgctctgggagagcacagaaaacagtcttctatcatatatcatagccagctgcaaacagcagatggcttcccatatcccagagagtaagaaccagagagagagagaaagagagagagtttgggtctttctcctctgtgcctgctctctccagagaaactggaggggtagcagttagcattcccccgctggttccaccaagcacagtcaaggtctctaggacatggccacccctcacctgtggaagcggtcctgctggggtgggtgggtgttagttggttctggtttgggtcagagacacccagtggcccaggtgggcgtggggccagggcgcagacgagaaggggcacgagggctccgctccgaggacccagcggcaagcaccggtcccgggcgcgccccagcccacccactcgcgtgcccacggcggcattattccctataaggatctgaacgatccgggggcggccccgccccgttaccccttgcccccggccccgccccctttttggagggccgatgaggtaatgcggctctgccattggtctgagggggcgggccccaacagcccgaggcggggtccccgggggcccagcgctatatcactcggccgcccaggcagcggcgcagagcgggcagcaggcaggcggcgggcgctcagacggcttctcctcctcctcttgctcctccagctcctgctccttcgccgggaggccgcccgccgagtcctgcgccagcgccgaggcagcctcgctgcgccccatcccgtcccgccgggcactcggagggcagcgcgccggaggccaaggttgccccgcacggcccggcgggcgagcgagctcgggctgcagcagccccgccggcggcgcgcacggcaactttggagaggcgagcagcagccccggcagcggcggcagcagcggcaatgaccccttggctcgggctcatcgtgctcctgggcagctggagcctgggggactggggcgccgaggcgtgcacatgctcgcccagccacccccaggacgccttctgcaactccgacatcgtgatccgggccaaggtggtggggaagaagctggtaaaggaggggcccttcggcacgctggtctacaccatcaagcagatgaagatgtaccgaggcttcaccaagatgccccatgtgcagtacatccacacggaagcttccgagagtctctgtggccttaagctggaggtcaacaagtaccagtacctgctgacaggtcgcgtctatgatggcaagatgtacacggggctgtgcaacttcgtggagaggtgggaccagctcaccctctcccagcgcaaggggctgaactatcggtatcacctgggttgtaactgcaagatcaagtcctgctactacctgccttgctttgtgacttccaagaacgagtgtctctggaccgacatgctctccaatttcggttaccctggctaccagtccaaacactacgcctgcatccggcagaagggcggctactgcagctggtaccgaggatgggcccccccggataaaagcatcatcaatgccacagacccctgagcgccagaccctgccccacctcacttccctcccttcccgctgagcttcccttggacactaactcttcccagatgatgacaatgaaattagtgcctgttttcttgcaaatttagcacttggaacatttaaagaaaggtctatgctgtcatatggggtttattgggaactatcctcctggccccaccctgccccttctttttggttttgacatcattcatttccacctgggaatttctggtgccatgccagaaagaatgaggaacctgtattcctcttcttcgtgataatataatctctatttttttaggaaaacaaaaatgaaaaactactccatttgaggattgtaattcccacccctcttgcttcttccccacctcaccatctcccagaccctcttccctttgcccttctcctccaatacataaaggacacagacaaggaacttgctgaaaggccaaccatttcaggatcagtcaaaggcagcaagcagatagactcaaggtgtgtgaaagatgttatacaccaggagctgccactgcatgtcccaaccagactgtgtctgtctgtgtctgcatgtaagagtgagggagggaaggaaggaactacaagagagtcggagatgatgcagcacacacacaattccccagcccagtgatgcttgtgttgaccagatgttcctgagtctggagcaagcacccaggccagaataacagagctttcttagttggtgaagacttaaacatctgcctgaggtcaggaggcaatttgcctgccttgtacaaaagctcaggtgaaagactgagatgaatgtctttcctctccctgcctcccaccagacttcctcctggaaaacgctttggtagatttggccaggagctttcttttatgtaaattggataaatacacacaccatacactatccacagatatagccaagtagatttgggtagaggatactatttccagaatagtgtttagctcacctagggggatatgtttgtatacacatttgcatatacccacatggggacataagctaatttttttacaggacacagaattctgttcaatgctgttaaatatgccaatagtttaatctcttctattttgttgtcgttgcttgtttgaagaaaatcatgacattccaagttgacatttttttttcattttaattaaaatttgaaattctgaacaccgtcagcaccctctcttccctatcatgggtcatctgacccctgtccgtctccttgtccctgcttcatgtttgggggcctttctttaactgccttcctggcttagctcagatggcagatgagagtgtagtcaagggcctgggcacaggagggagagctgcagagtgtcctgcctgccttggctggagggacacctctcctgggtgtggagacagcttggttccctttccctagctccctggtgggtgaatgccacctcctgagatcctcacctcttggaattaaaattgttggtcactggggaaagcctgagtttgcaaccagttgtagggtttctgttgtgtttttttttttttttttgaaataaaactataatataaattctcctattaaataaaattattttaagttttagtgtcaaaagtgagatgctgagagtaggtgataatgtatattttacagagtgggggttggcaggatggtgacattgaacatgattgctctctgtctcttttttcagcttatgggtatttatcttctattagtatttgtatcttcagttcattccactttaggaaacagagctgccaattgaaacagaagaagaaaaaaaaaaaaagcagcagacaacacactgtagagtcttgcacacacacaagtgcccaggcaaggtgcttggcagaaccgcagagtgggaagagagtaccggcatcgggtttccttgggatcaatttcattaccgtgtacctttcccattgtggtcatgccatttggcagggggagaatgggaggcttggccttctttgtgaggcagtgtgagcagaagctgatgccagcatgtcactggttttgaagggatgagcccagacttgatgttttgggattgtccttattttaacctcaaggtctcgcatggtggggcccctgaccaacctacacaagttccctcccacaagtggacatcagtgtcttctctgtgaggcatctggccattcgcactccctggtgtggtcagcctctctcacacaaggaggaacttgggtgaaggctgagtgtgaggcacctgaagtttccctgcggagtcgataaattagcagaaccacatccccatctgttaggccttggtgaggaggccctgggcaaagaagggtctttcgcaaagcgatgtcagagggcggttttgagctttctataagctatagctttgtttatttcacccgttcacttactgtataatttaaaatcatttatgtagctgagacacttctgtatttcaatcatatcatgaacattttattttgctaaatcttgtgtcatgtgtaggctgtaatatgtgtacattgtgtttaagagaaaaatgaaacccacatgccgccattttcctgaatcaaattctgcagtggaatggagaggaaaatacttctaggcaagcagctagactggtgaattgggggaaatagaaggaactagtaactgagactcctccagcctcctccctattggaatcccaatggctcctggagtaggaaaaaagtttaaactacattcatgttcttgttctgtgtcactcggccctgggtagtctaccatttacttcaccccaagtcctgctgcccatccagttgggaagccatgattttcctaagaatccagggccatgggagatacaattccaagttctcgcttcctcctttgggcatctcttctgcctcccaatcaaggaagctccatgctcaggctctcagctctcgggccagtgctctgctctgtccagggtaggtaatactgggagactcctgtcttttaccctcccctcgttccagacctgcctcatggtggcaacatggttcttgaacaattaaagaaacaaatgactttttggaatagccctgtctagggcaaactgtggcccccaggagacactacccttccatgccccagacctctgtcttgcatgtgacaattgacaatctggactaccccaagatggcacccaagtgtttggcttctggctacctaaggttaacatgtcactagagtatttttatgagagacaaacattataaaaatctgatggcaaaagcaaaacaaaatggaaagtaggggaggtggatgtgacaacaacttccaaattggctctttggaggcgagaggaaggggagaacttggagaatagtttttgctttgggggtagaggcttcttagattctcccagcatccgcctttccctttagccagtctgctgtcctgaaacccagaagtgatggagagaaaccaacaagagatctcgaaccctgtctagaaggaatgtatttgttgctaaatttcgtagcactgtttacagttttcctccatgttatttatgaattttatattccgtgaatgtatattgtcttgtaatgttgcataatgttcactttttatagtgtgtcctttattctaaacagtaaagtggttttatttctatcac

SEQ ID NO: 213 - DNA, 1189 bp, Homo sapiens
cctgctggggccgtccagtcccccagacctcacaggctcagtcgcggatctgcagtgtcatgcctgggagccctcggcccgcgccaagctgggtgctgttgctgcggctgctggcgttgctgcggcccccggggctgggtgaggcatgcagctgcgccccggcgcaccctcagcagcacatctgccactcggcacttgtgattcgggccaaaatctccagtgagaaggtagttccggccagtgcagaccctgctgacactgaaaaaatgctccggtatgaaatcaaacagataaagatgttcaaagggtttgagaaagtcaaggatgttcagtatatctatacgccttttgactcttccctctgtggtgtgaaactagaagccaacagccagaagcagtatctcttgactggtcaggtcctcagtgatggaaaagtcttcatccatctgtgcaactacatcgagccctgggaggacctgtccttggtgcagagggaaagtctgaatcatcactaccatctgaactgtggctgccaaatcaccacctgctacacagtaccctgtaccatctcggcccctaacgagtgcctctggacagactggctgttggaacgaaagctctatggttaccaggctcagcattatgtctgtatgaagcatgttgacggcacctgcagctggtaccggggccacctgcctctcaggaaggagtttgttgacatcgttcagccctagtagggaccagtgaccatcacatcccttcaagagtcctgaagatcaagccagttctccttccctgcagagctttggccattaccacctgacctcttgctgccagctaataagaagtgccaagtggacagtctggccactgtcaaggcagggaaggggccatgacttttctgccctgccctcagcctgttgccctgcctcccaaaccccattagtctagccttgtagctgttactgcaagtgtttcttctggcttagtctgttttctaaagccaggactattccctttcctccccaggaatatgtgttttcctttgtcttaatcgatctggtaggggagaaatggcgaatgtcatacacatgagatggtatatccttgcgatgtacagaatcagaaggtggtttgacagcatcataaacaggctgactggcaggaatgaaaaaaaaaaaaaaaaaaa

SEQ ID NO: 214 - DNA, 934 bp, Homo sapiens
tgagaagatgcaaccaatcctgcttctgctggccttcctcctgctgcccagggcagatgcaggggagatcatcgggggacatgaggccaagccccactcccgcccctacatggcttatcttatgatctgggatcagaagtctctgaagaggtgcggtggcttcctgatacaagacgacttcgtgctgacagctgctcactgttggggaagctccataaatgtcaccttgggggcccacaatatcaaagaacaggagccgacccagcagtttatccctgtgaaaagacccatcccccatccagcctataatcctaagaacttctccaacgacatcatgctactgcagctggagagaaaggccaagcggaccagagctgtgcagcccctcaggctacctagcaacaaggcccaggtgaagccagggcagacatgcagtgtggccggctgggggcagacggcccccctgggaaaacactcacacacactacaagaggtgaagatgacagtgcaggaagatcgaaagtgcgaatctgacttacgccattattacgacagtaccattgagttgtgcgtgggggacccagagattaaaaagacttcctttaagggggactctggaggccctcttgtgtgtaacaaggtggcccagggcattgtctcctatggacgaaacaatggcatgcctccacgagcctgcaccaaagtctcaagctttgtacactggataaagaaaaccatgaaacgctactaactacaggaagcaaactaagcccccgctgtaatgaaacaccttctctggagccaagtccagatttacactgggagaggtgccagcaactgaataaatacctctcccagtgtaaatctggagccaagtccagatttacactgggagaggtgccagcaactgaataaatacctcttagctgagtgg

SEQ ID NO: 215 - DNA, 1456 bp, Homo sapiens
gggacgctctcagctctcggcgcacggcccaggttatcttgtagcatagcaacttcggatttcactctacccggagagtttcccgcttggttgaacacattggcctcaggaagcttccttcaaaatgtctactgttcacgaaatcctgtgcaagctcagcttggagggtgatcactctacacccccaagtgcatatgggtctgtcaaagcctatactaactttgatgctgagcgggatgctttgaacattgaaacagccatcaagaccaaaggtgtggatgaggtcaccattgtcaacattttgaccaaccgcagcaatgcacagagacaggatattgccttcgcctaccagagaaggaccaaaaaggaacttgcatcagcactgaagtcagccttatctggccacctggagacggtgattttgggcctattgaagacacctgctcagtatgacgcttctgagctaaaagcttccatgaaggggctgggaaccgacgaggactctctcattgagatcatctgctccagaaccaaccaggagctgcaggaaattaacagagtctacaaggaaatgtacaagactgatctggagaaggacattatttcggacacatctggtgacttccgcaagctgatggttgccctggcaaagggtagaagagcagaggatggctctgtcattgattatgaactgattgaccaagatgctcgggatctctatgacgctggagtgaagaggaaaggaactgatgttcccaagtggatcagcatcatgaccgagcggagcgtgccccacctccagaaagtatttgataggtacaagagttacagcccttatgacatgttggaaagcatcaggaaagaggttaaaggagacctggaaaatgctttcctgaacctggttcagtgcattcagaacaagcccctgtattttgctgatcggctgtatgactccatgaagggcaaggggacgcgagataaggtcctgatcagaatcatggtctcccgcagtgaagtggacatgttgaaaattaggtctgaattcaagagaaagtacggcaagtccctgtactattatatccagcaagacactaagggcgactaccagaaagcgctgctgtacctgtgtggtggagatgactgaagcccgacacggcctgagcgtccagaaatggtgctcaccatgcttccagctaacaggtctagaaaaccagcttgcgaataacagtccccgtggccatccctgtgagggtgacgttagcattacccccaacctcattttagttgcctaagcattgcctggccttcctgtctagtctctcctgtaagccaaagaaatgaacattccaaggagttggaagtgaagtctatgatgtgaaacactttgcctcctgtgtactgtgtcataaacagatgaataaactgaatttgtactttaaaaaaaaaaaaaaaaaaa

SEQ ID NO: 216 - DNA, 1343 bp, Homo sapiens
ggcagtggctgggaggcagcggcccaattagtgtcgtgcggcccgtggcgaggcgaggtccggggagcgagcgagcaagcaaggcgggaggggtggccggagctgcggcggctggcacaggaggaggagcccgggcgggcgaggggcggccggagagcgccagggcctgagctgccggagcggcgcctgtgagtgagtgcagaaagcaggcgcccgcgcgctagccgtggcaggagcagcccgcacgccgcgctctctccctgggcgacctgcagtttgcaatatgactttggaggaattctcggctggagagcagaagaccgaaaggatggataaggtgggggatgccctggaggaagtgctcagcaaagccctgagtcagcgcacgatcactgtcggggtgtacgaagcggccaagctgctcaacgtcgaccccgataacgtggtgttgtgcctgctggcggcggacgaggacgacgacagagatgtggctctgcagatccacttcaccctgatccaggcgttttgctgcgagaacgacatcaacatcctgcgcgtcagcaacccgggccggctggcggagctcctgctcttggagaccgacgctggccccgcggcgagcgagggcgccgagcagcccccggacctgcactgcgtgctggtgacgaatccacattcatctcaatggaaggatcctgccttaagtcaacttatttgtttttgccgggaaagtcgctacatggatcaatgggttccagtgattaatctccctgaacggtgatggcatctgaatgaaaataactgaaccaaattgcactgaagtttttgaaatacctttgtagttactcaagcagttactccctacactgatgcaaggattacagaaactgatgccaaggggctgagtgagttcaactacatgttctgggggcccggagatagatgactttgcagatggaaagaggtgaaaatgaagaaggaagctgtgttgaaacagaaaaataagtcaaaaggaacaaaaattacaaagaaccatgcaggaaggaaaactatgtattaatttagaatggttgagttacattaaaataaaccaaatatgttaaagtttaagtgtgcagccatagtttgggtatttttggtttatatgccctcaagtaaaagaaaagccgaaagggttaatcatatttgaaaaccatattttattgtattttgatgagatattaaattctcaaagttttattataaattctactaagttattttatgacatgaaaagttatttatgctataaattttttgaaacacaatacctacaataaactggtatgaataattgcatcatt

SEQ ID NO: 217 - DNA, 998 bp, Homo sapiens
aggcagtggctgggaggcagcggcccaattagtgtcgtgcggcccgtggcgaggcgaggtccggggagcgagcgagcaagcaaggcgggaggggtggccggagctgcggcggctggcacaggaggaggagcccgggcgggcgaggggcggccggagagcgccagggcctgagctgccggagcggcgcctgtgagtgagtgcagaaagcaggcgcccgcgcgctagccgtggcaggagcagcccgcacgccgcgctctctccctgggcgacctgcagtttgcaatatgactttggaggaattctcggctggagagcagaagaccgaaaggatggataaggtgggggatgccctggaggaagtgctcagcaaagccctgagtcagcgcacgatcactgtcggggtgtacgaagcggccaagctgctcaacgtcgaccccgataacgtggtgttgtgcctgctggcggcggacgaggacgacgacagagatgtggctctgcagatccacttcaccctgatccaggcgttttgctgcgagaacgacatcaacatcctgcgcgtcagcaacccgggccggctggcggagctcctgctcttggagaccgacgctggccccgcggcgagcgagggcgccgagcagcccccggacctgcactgcgtgctggtgacgaatccacattcatctcaatggaaggatcctgccttaagtcaacttatttgtttttgccgggaaagtcgctacatggatcaatgggttccagtgattaatctccctgaacggtgatggcatctgaatgaaaataactgaaccaaattgcactgaagtttttgaaatacctttgtagttactcaagcagttactccctacactgatgcaaggattacagaaactgatgccaaggggctgagtgagttcaactacatgttctgggggcccggagatagatgactttgcagatggaaagaggtgaaaatgaagaaggaagctgtgttgaaacag

SEQ ID NO: 218 - DNA, 1355 bp, Homo sapiens
cagtggctggtaggcagtggctgggaggcagcggcccaattagtgtcgtgcggcccgtggcgaggcgaggtccggggagcgagcgagcaagcaaggcgggaggggtggccggagctgcggcggctggcacaggaggaggagcccgggcgggcgaggggcggccggagagcgccagggcctgagctgccggagcggcgcctgtgagtgagtgcagaaagcaggcgcccgcgcgctagccgtggcaggagcagcccgcacgccgcgctctctccctgggcgacctgcagtttgcaatatgactttggaggaattctcggctggagagcagaagaccgaaaggatggataaggtgggggatgccctggaggaagtgctcagcaaagccctgagtcagcgcacgatcactgtcggggtgtacgaagcggccaagctgctcaacgtcgaccccgataacgtggtgttgtgcctgctggcggcggacgaggacgacgacagagatgtggctctgcagatccacttcaccctgatccaggcgttttgctgcgagaacgacatcaacatcctgcgcgtcagcaacccgggccggctggcggagctcctgctcttggagaccgacgctggccccgcggcgagcgagggcgccgagcagcccccggacctgcactgcgtgctggtgacgaatccacattcatctcaatggaaggatcctgccttaagtcaacttatttgtttttgccgggaaagtcgctacatggatcaatgggttccagtgattaatctccctgaacggtgatggcatctgaatgaaaataactgaaccaaattgcactgaagtttttgaaatacctttgtagttactcaagcagttactccctacactgatgcaaggattacagaaactgatgccaaggggctgagtgagttcaactacatgttctgggggcccggagatagatgactttgcagatggaaagaggtgaaaatgaagaaggaagctgtgttgaaacagaaaaataagtcaaaaggaacaaaaattacaaagaaccatgcaggaaggaaaactatgtattaatttagaatggttgagttacattaaaataaaccaaatatgttaaagtttaagtgtgcagccatagtttgggtatttttggtttatatgccctcaagtaaaagaaaagccgaaagggttaatcatatttgaaaaccatattttattgtattttgatgagatattaaattctcaaagttttattataaattctactaagttattttatgacatgaaaagttatttatgctataaattttttgaaacacaatacctacaataaactggtatgaataattgcatcatt

SEQ ID NO: 219 - DNA, 1121 bp, Homo sapiens
ctagctctgtgggaaggttttgggctctctggctcggattttgcaatttctccctggggactgccgtggagccgcatccactgtggattataattgcaacatgacgctggaagagctcgtggcgtgcgacaacgcggcgcagaagatgcagacggtgaccgccgcggtggaggagcttttggtggccgctcagcgccaggatcgcctcacagtgggggtgtacgagtcggccaagttgatgaatgtggacccagacagcgtggtcctctgcctcttggccattgacgaggaggaggaggatgacatcgccctgcaaatccacttcacgctcatccagtccttctgctgtgacaacgacatcaacatcgtgcgggtgtcgggcaatgcgcgcctggcgcagctcctgggagagccggccgagacccagggcaccaccgaggcccgagacctccactgtcttcccttcctacagaaccctcacacggacgcctggaagagccacggcttggtggaggtggccagctactgcgaagaaagccggggcaacaaccagtgggtcccctacatctctcttcaggaacgctgaggcccttcccagcagcagaatctgttgagttgctgccaacaaacaaaaaatacaataaatatttgaaccccctcccccccagcacaacccccccaaaacaacccaacccacgaggaccatcgggggcaggtcgttggagactgaagagaaagagagagaggagaagggagtgaggggccgctgccgccttccccatcacggagggtccagactgtccactcgggggtggagtgagactgactgcaagccccaccctccttgagactggagctgagcgtctgcatacgagagacttggttgaaacttggttggtccttgtctgcaccctcgacaagaccacactttgggacttgggagctggggctgaagttgctctgtacccatgaactcccagtttgcgaattaataagagacaatctattttgttacttgcacttgttattcgaaccactgagagcgagatgggaagcatagatatctatatttttatttctactatgagggccttgtaataaatttctaaagcctcaaaaaa

SEQ ID NO: 220 - DNA, 1378 bp, Homo sapiens
agcgtcggactaccgttggtttccgcaacttcctggattatcctcgccaaggactttgcaatatatttttccgccttttctggaaggatttcgctgcttcccgaagtcttggacgagcgctctagctctgtgggaaggttttgggctctctggctcggattttgcaatttctccctggggactgccgtggagccgcatccactgtggattataattgcaacatgacgctggaagagctcgtggcgtgcgacaacgcggcgcagaagatgcagacggtgaccgccgcggtggaggagcttttggtggccgctcagcgccaggatcgcctcacagtgggggtgtacgagtcggccaagttgatgaatgtggacccagacagcgtggtcctctgcctcttggccattgacgaggaggaggaggatgacatcgccctgcaaatccacttcacgctcatccagtccttctgctgtgacaacgacatcaacatcgtgcgggtgtcgggcatgcagcgcctggcgcagctcctgggagagccggccgagacccagggcaccaccgaggcccgagacctgcattgtctcctggtcacgaaccctcacacggacgcctggaagagccacggcttggtggaggtggccagctactgcgaagaaagccggggcaacaaccagtgggtcccctacatctctcttcaggaacgctgaggcccttcccagcagcagaatctgttgagttgctgccacaaacaaaaaatacaataaatatttgaaccccctcccccccagcacaacccccccaaaacaacccaacccacgaggaccatcgggggcagagtcgttggagactgaagaggaagaggaggaggagaaggggagtgagcggtccgcccccagggacgctctccaggagctggcggccgccgatcagatggagaaggggggacccaggccagcaggagacaggacccccgaagctgaggccttgggatggagcagaagccggagtggcggggcacgctgccgccttccccatcacggagggtccagactgtccactcgggggtggagtgagactgactgcaagccccaccctccttgagactggagctggcgtctgcatacgagagacttggttgaacttggttggtccttgtctgcaccctcgacaagaccacactttgggacttgggagctggggctgaagttgctctgtacccatgaactcccagtttgcgaattatagagacaatctattttgttacttgcacttgttattcgaaccactgagagcgagatgggaagcatagatatctatatttttatttctactatgagggccttgtaataaatttctaaagcctctgaaaaaaaaaaaaaaa

SEQ ID NO: 221 - DNA, 1078 bp, Homo sapiens
cactcgctggtggtgggtgcgccgtgctgagctctggctgtcagtgtgttcgcccgcgtcccctccgcgctctccgcttgtggataactagctgctggttgatcgcactatgactctggaagaagtccgcggccaggacacagttccggaaagcacagccaggatgcagggtgccgggaaagcgctgcatgagttgctgctgtcggcgcagcgtcagggctgcctcactgccggcgtctacgagtcagccaaagtcttgaacgtggaccccgacaatgtgaccttctgtgtgctggctgcgggtgaggaggacgagggcgacatcgcgctgcagatccattttacgctgatccaggctttctgctgcgagaacgacatcgacatagtgcgcgtgggcgatgtgcagcggctggcggctatcgtgggcgccggcgaggaggcgggtgcgccgggcgacctgcactgcatcctcatttcgaaccccaacgaggacgcctggaaggatcccgccttggagaagctcagcctgttttgcgaggagagccgcagcgttaacgactgggtgcccagcatcaccctccccgagtgacagcccggcggggaccttggtctgatcgacgtggtgacgccccggggcgcctagagcgcggctggctctgtggaggggccctccgagggtgcccgagtgcggcgtggagactggcaggcggggggggcgcctggagagcgaggaggcgcggcctcccgaggaggggcccggtggcggcagggccaggctggtccgagctgaggactctgcaagtgtctggagcggctgctcgcccaggaaggcctaggctaggacgttggcctcagggccaggaaggacagactggccgggcaggcgtgactcagcagcctgcgctcggcaggaaggagcggcgccctggacttggtacagtttcaggagcgtgaaggacttaaccgactgccgctgctttttcaaaacggatccgggcaatgcttcgttttctaaaggatgctgctgttgaagctttgaattttacaataaactttttgaaacaaaaaaaaaaaaaaa

SEQ ID NO: 222 - DNA, 3775 bp, Homo sapiens
cattcataagactcagagctacggccacggcagggacacgcggaaccaagacttggaaacttgattgttgtggttcttcttgggggttatgaaatttcattaatcttttttttttccggggagaaagtttttggaaagattcttccagatatttcttcattttcttttggaggaccgacttactttttttggtcttctttattactcccctccccccgtgggacccgccggacgcgtggaggagaccgtagctgaagctgattctgtacagcgggacagcgctttctgcccctgggggagcaacccctccctcgcccctgggtcctacggagcctgcactttcaagaggtacagcggcatcctgtgggggcctgggcaccgcaggaagactgcacagaaactttgccattgttggaacgggacgttgctccttccccgagcttccccggacagcgtactttgaggactcgctcagctcaccggggactcccacggctcaccccggacttgcaccttacttccccaacccggccatagccttggcttcccggcgacctcagcgtggtcacaggggcccccctgtgcccagggaaatgtttcaggctttccccggagactacgactccggctcccggtgcagctcctcaccctctgccgagtctcaatatctgtcttcggtggactccttcggcagtccacccaccgccgcggcctcccaggagtgcgccggtctcggggaaatgcccggttccttcgtgcccacggtcaccgcgatcacaaccagccaggacctccagtggcttgtgcaacccaccctcatctcttccatggcccagtcccaggggcagccactggcctcccagcccccggtcgtcgacccctacgacatgccgggaaccagctactccacaccaggcatgagtggctacagcagtggcggagcgagtggcagtggtgggccttccaccagcggaactaccagtgggcctgggcctgcccgcccagcccgagcccggcctaggagaccccgagaggagacgctcaccccagaggaagaggagaagcgaagggtgcgccgggaacgaaataaactagcagcagctaaatgcaggaaccggcggagggagctgaccgaccgactccaggcggagacagatcagttggaggaagaaaaagcagagctggagtcggagatcgccgagctccaaaaggagaaggaacgtctggagtttgtgctggtggcccacaaaccgggctgcaagatcccctacgaagaggggcccgggccgggcccgctggcggaggtgagagatttgccgggctcagcaccggctaaggaagatggcttcagctggctgctgccgcccccgccaccaccgcccctgcccttccagaccagccaagacgcaccccccaacctgacggcttctctctttacacacagtgaagttcaagtcctcggcgaccccttccccgttgttaacccttcgtacacttcttcgtttgtcctcacctgcccggaggtctccgcgttcgccggcgcccaacgcaccagcggcagtgaccagccttccgatcccctgaactcgccctccctcctcgctcggtgaactctttagacacacaaaacaaacaaacacatgggggagagagacttggaagaggaggaggaggaggagaaggaggagagagaggggaagagacaaagtgggtgtgtggcctccctggctcctccgtctgaccctctgcggccactgcgccactgccatcggacaggaggattccttgtgttttgtcctgcctcttgtttctgtgccccggcgaggccggagagctggtgactttggggacagggggtgggaaggggatggacacccccagctgactgttggctctctgacgtcaacccaagctctggggatgggtggggaggggggcgggtgacgcccaccttcgggcagtcctgtgtgaggatgaagggacgggggtgggaggtaggctgtggggtgggctggagtcctctccagagaggctcaacaaggaaaaatgccactccctacccaatgtctcccacacccaccctttttttggggtgcccaggttggtttcccctgcactcccgaccttagcttattgatcccacatttccatggtgtgagatcctctttactctgggcagaagtgagcccccccttaaagggaattcgatgcccccctagaataatctcatccccccacccgacttcttttgaaatgtgaacgtccttccttgactgtctagccactccctcccagaaaaactggctctgattggaatttctggcctcctaaggctccccaccccgaaatcagcccccagccttgtttctgatgacagtgttatcccaagaccctgccccctgccagccgaccctcctggccttcctcgttgggccgctctgatttcaggcagcaggggctgctgtgatgccgtcctgctggagtgatttatactgtgaaatgagttggccagattgtggggtgcagctgggtggggcagcacacctctggggggataatgtccccactcccgaaagcctttcctcggtctcccttccgtccatcccccttcttcctcccctcaacagtgagttagactcaagggggtgacagaaccgagaagggggtgacagtcctccatccacgtggcctctctctctctcctcaggaccctcagccctggcctttttctttaaggtcccccgaccaatccccagcctaggacgccaacttctcccaccccttggcccctcacatcctctccaggaaggcagtgaggggctgtgacatttttccggagaagatttcagagctgaggctttggtacccccaaacccccaatatttttggactggcagactcaaggggctggaatctcatgattccatgcccgagtccgcccatccctgaccatggttttggctctcccaccccgccgttccctgcgcttcatctcatgaggatttctttatgaggcaaatttatattttttaatatcggggggtggaccacgccgccctccatccgtgctgcatgaaaaacattccacgtgccccttgtcgcgcgtctcccatcctgatcccagacccattccttagctatttatccctttcctggtttccgaaaggcaattatatctattatgtataagtaaatatattatatatggatgtgtgtgtgtgcgtgcgcgtgagtgtgtgagcgcttctgcagcctcggcctaggtcacgttggccctcaaagcgagccgttgaattggaaactgcttctagaaactctggctcagcctgtctcgggctgacccttttctgatcgtctcggcccctctgattgttcccgatggtctctctccctctgtcttttctcctccgcctgtgtccatctgaccgttttcacttgtctcctttctgactgtccctgccaatgctccagctgtcgtctgactctgggttcgttggggacatgagattttattttttgtgagtgagactgagggatcgtagatttttacaatctgtatctttgacaattctgggtgcgagtgtgagagtgtgagcagggcttgctcctgccaaccacaattcaatgaatccccgacccccctaccccatgctgtacttgtggttctctttttgtattttgcatctgaccccggggggctgggacagattggcaatgggccgtcccctctccccttggttctgcactgttgccaataaaaagctcttaaaaacgc

SEQ ID NO: 223 - DNA, 4157 bp, Homo sapiens
agcggggcggggcgccagcgctgccttttctcctgccgggtagtttcgctttcctgcgcagagtctgcggaggggctcggctgcaccggggggatcgcgcctggcagaccccagaccgagcagaggcgacccagcgcgctcgggagaggctgcaccgccgcgcccccgcctagcccttccggatcctgcgcgcagaaaagtttcatttgctgtatgccatcctcgagagctgtctaggttaacgttcgcactctgtgtatataacctcgacagtcttggcacctaacgtgctgtgcgtagctgctcctttggttgaatccccaggcccttgttggggcacaaggtggcaggatgtctcagtggtacgaacttcagcagcttgactcaaaattcctggagcaggttcaccagctttatgatgacagttttcccatggaaatcagacagtacctggcacagtggttagaaaagcaagactgggagcacgctgccaatgatgtttcatttgccaccatccgttttcatgacctcctgtcacagctggatgatcaatatagtcgcttttctttggagaataacttcttgctacagcataacataaggaaaagcaagcgtaatcttcaggataattttcaggaagacccaatccagatgtctatgatcatttacagctgtctgaaggaagaaaggaaaattctggaaaacgcccagagatttaatcaggctcagtcggggaatattcagagcacagtgatgttagacaaacagaaagagcttgacagtaaagtcagaaatgtgaaggacaaggttatgtgtatagagcatgaaatcaagagcctggaagatttacaagatgaatatgacttcaaatgcaaaaccttgcagaacagagaacacgagaccaatggtgtggcaaagagtgatcagaaacaagaacagctgttactcaagaagatgtatttaatgcttgacaataagagaaaggaagtagttcacaaaataatagagttgctgaatgtcactgaacttacccagaatgccctgattaatgatgaactagtggagtggaagcggagacagcagagcgcctgtattggggggccgcccaatgcttgcttggatcagctgcagaactggttcactatagttgcggagagtctgcagcaagttcggcagcagcttaaaaagttggaggaattggaacagaaatacacctacgaacatgaccctatcacaaaaaacaaacaagtgttatgggaccgcaccttcagtcttttccagcagctcattcagagctcgtttgtggtggaaagacagccctgcatgccaacgcaccctcagaggccgctggtcttgaagacaggggtccagttcactgtgaagttgagactgttggtgaaattgcaagagctgaattataatttgaaagtcaaagtcttatttgataaagatgtgaatgagagaaatacagtaaaaggatttaggaagttcaacattttgggcacgcacacaaaagtgatgaacatggaggagtccaccaatggcagtctggcggctgaatttcggcacctgcaattgaaagaacagaaaaatgctggcaccagaacgaatgagggtcctctcatcgttactgaagagcttcactcccttagttttgaaacccaattgtgccagcctggtttggtaattgacctcgagacgacctctctgcccgttgtggtgatctccaacgtcagccagctcccgagcggttgggcctccatcctttggtacaacatgctggtggcggaacccaggaatctgtccttcttcctgactccaccatgtgcacgatgggctcagctttcagaagtgctgagttggcagttttcttctgtcaccaaaagaggtctcaatgtggaccagctgaacatgttgggagagaagcttcttggtcctaacgccagccccgatggtctcattccgtggacgaggttttgtaaggaaaatataaatgataaaaattttcccttctggctttggattgaaagcatcctagaactcattaaaaaacacctgctccctctctggaatgatgggtgcatcatgggcttcatcagcaaggagcgagagcgtgccctgttgaaggaccagcagccggggaccttcctgctgcggttcagtgagagctcccgggaaggggccatcacattcacatgggtggagcggtcccagaacggaggcgaacctgacttccatgcggttgaaccctacacgaagaaagaactttctgctgttactttccctgacatcattcgcaattacaaagtcatggctgctgagaatattcctgagaatcccctgaagtatctgtatccaaatattgacaaagaccatgcctttggaaagtattactccaggccaaaggaagcaccagagccaatggaacttgatggccctaaaggaactggatatatcaagactgagttgatttctgtgtctgaagttcacccttctagacttcagaccacagacaacctgctccccatgtctcctgaggagtttgacgaggtgtctcggatagtgggctctgtagaattcgacagtatgatgaacacagtatagagcatgaatttttttcatcttctctggcgacagttttccttctcatctgtgattccctcctgctactctgttccttcacatcctgtgtttctagggaaatgaaagaaaggccagcaaattcgctgcaacctgttgatagcaagtgaatttttctctaactcagaaacatcagttactctgaagggcatcatgcatcttactgaaggtaaaattgaaaggcattctctgaagagtgggtttcacaagtgaaaaacatccagatacacccaaagtatcaggacgagaatgagggtcctttgggaaaggagaagttaagcaacatctagcaaatgttatgcataaagtcagtgcccaactgttataggttgttggataaatcagtggttatttagggaactgcttgacgtaggaacggtaaatttctgtgggagaattcttacatgttttctttgctttaagtgtaactggcagttttccattggtttacctgtgaaatagttcaaagccaagtttatatacaattatatcagtcctctttcaaaggtagccatcatggatctggtagggggaaaatgtgtattttattacatctttcacattggctatttaaagacaaagacaaattctgtttcttgagaagagaatattagctttactgtttgttatggcttaatgacactagctaatatcaatagaaggatgtacatttccaaattcacaagttgtgtttgatatccaaagctgaatacattctgctttcatcttggtcacatacaattatttttacagttctcccaagggagttaggctattcacaaccactcattcaaaagttgaaattaaccatagatgtagataaactcagaaatttaattcatgtttcttaaatgggctactttgtcctttttgttattagggtggtatttagtctattagccacaaaattgggaaaggagtagaaaaagcagtaactgacaacttgaataatacaccagagataatatgagaatcagatcatttcaaaactcatttcctatgtaactgcattgagaactgcatatgtttcgctgatatatgtgtttttcacatttgcgaatggttccattctctctcctgtactttttccagacacttttttgagtggatgatgtttcgtgaagtatactgtatttttacctttttccttccttatcactgacacaaaaagtagattaagagatgggtttgacaaggttcttcccttttacatactgctgtctatgtggctgtatcttgtttttccactactgctaccacaactatattatcatgcaaatgctgtattcttctttggtggagataaagatttcttgagttttgttttaaaattaaagctaaagtatctgtattgcattaaatataatatgcacacagtgctttccgtggcactgcatacaatctgaggcctcctctctcagtttttatatagatggcgagaacctaagtttcagttgattttacaattgaaatgactaaaaaacaaagaagacaacattaaaacaatattgtttcta

SEQ ID NO: 224 - DNA, 2588 bp, Homo sapiens
gctttctcctagggactgtgaggggcgcttctgactttggacttgagcactgcctgggacctgtgctgagagagcgctagcatgtctcagtggaatcaagtccaacagttagaaatcaagtttttggagcaggtggatcaattctatgatgacaactttcccatggaaattcggcatctgttggcccaatggattgaaaatcaagactgggaggcagcttctaacaatgaaaccatggcaacgattcttcttcaaaacttgttaatacaactggatgaacagttaggtcgtgtttccaaagagaaaaacctactcttgatacacaatctaaaaagaattaggaaggtccttcagggaaaatttcatggaaatccaatgcatgtagctgtggttatttcaaactgtttaagggaagagaggagaatattggctgcagccaacatgcctgtccaggggcctctagagaaatccttacaaagttcttcagtttcagaaagacagaggaatgtggagcacaaagtggctgccattaaaaacagtgtgcagatgacagaacaagataccaaatacttagaagatctgcaagacgaatttgactacaggtataaaacaattcagacaatggatcagagtgacaagaatagtgccatggtgaatcaggaagttttgacactgcaggaaatgcttaacagcctcgatttcaagagaaaggaggctctcagtaaaatgacccaaatcatccatgagacagacctgttaatgaacaccatgctcatagaagagctgcaagactggaagcggcggcagcaaatcgcctgcatcgggggtccactccacaatgggctcgaccagcttcagaactgctttacactattggcagaaagtcttttccaactgagaaggcaattggagaaactagaggagcaatctaccaaaatgacatatgaaggtgatcccattccaatgcaaagaactcacatgctagaaagagtcaccttcttgatctacaaccttttcaagaactcatttgtggttgagcgacagccatgtatgccaacccaccctcagaggccgttggtacttaaaaccctaattcagttcactgtaaaactaaggctactaataaaattgccagaactaaactatcaggtaaaggttaaggcatcaattgacaagaatgtttcaactctaagcaaccgaagatttgtactttgtggaactaatgtcaaagccatgtctattgaagaatcttccaatgggagtctctcagtagaatttcgacatttgcaaccaaaggaaatgaagtccagtgctggaggtaaaggaaatgagggctgtcacatggtgactgaagaacttcattccataacgtttgaaacacagatctgcctctatggcctgaccatagatttggagaccagctcattgcctgtggtgatgatttccaatgtcagtcagttacctaatgcttgggcatccatcatttggtacaacgtgtcaaccaacgattcccagaacttggttttctttaataatcctccacctgccacattgagtcaactactggaggtgatgagctggcagttttcatcgtacgttggtcgtggtcttaactcagatcaactccatatgctggcagagaagcttacagtccaatctagctacagtgatggtcacctcacctgggccaagttctgcaaggaacatttacctggtaaatcatttaccttttggacatggcttgaagcaatattggatctaattaagaaacacattcttcccctttggattgatgggtatgtcatgggctttgttagcaaagagaaggaacggctgttgctaaaggataaaatgcctggcacctttttattaagattcagtgaaagccatctcggaggaataactttcacctgggtggaccattctgaaagtggggaagtgagattccactctgtagaaccctacaataaaggccggttgtctgctctgccattcgctgacatcctgcgagactacaaagttattatggctgaaaacattcctgaaaaccctctgaagtacctatatcctgacattcccaaagacaaagccttcggtaaacactacagctctcagccttgcgaagtttcaagaccaacagaaaggggtgacaaaggttatgttccttctgtttttatccccatctcaacaatccgaagtgattcaacagagccacattctccatcagaccttcttcccatgtctccaagtgtgtatgcggtgttgagagaaaacctgagtcccacaacaattgaaactgcaatgaagtctccttattctgctgaatgacaggataaactctgacgcaccaagaaaggaagcaaatgaaaaagtttaaagactgttctttgcccaataaccacattttatttcttcagctttgtaaataccaggttctaggaaatgtttgacatctgaagctctcttcacactcccgtggcactcctcaattgggagtgttgtgactgaaatgcttgaaaccaaagcttcagataaacttgcaagataagacaactttaagaaaccagtgttaataacaatattaacag

SEQ ID NO: 225 - DNA, 2271 bp, Homo sapiens
gcacgcactggccccggcgcccacccgcacccctccccagagagcactgacacggctcccgggacctcggcaggatggaagagaagctgaagaaaaccaagatcatctttgtggtgggtgggcctggctcagggaagggcacccagtgtgagaagatcgtgcagaagtatggctacacccacctctccaccggggacctcctgcggtccgaggtcagctcaggctcggccaggggcaagaagctgtcggaaatcatggagaaggggcagctggttccactggagacagtgttggacatgctccgggatgccatggtggccaaagtcaatacttccaaaggcttcctgattgatggctacccgcgggaggtgcagcaaggagaagagtttgagcgacggattggacagcccacactgctgctgtatgtggacgcaggccctgagaccatgacccagcggctcttgaaacgtggagagaccagcgggcgtgtggacgacaatgaggagaccatcaaaaagcggctggagacctattacaaggccacagaacccgtcatcgccttctatgagaaacgtggcattgtgcgcaaggtcaacgctgagggctccgtggacagtgtcttctcccaggtctgcacccacctggacgccctaaagtagcaacgctggagccgcttccccagctcagagccccgccccaccccgtcctgattagaggtcctcctggcctgagcgcagcgcctccaccctgccctgctgagcacagacggaggaagccgcttatcctgttttcatggacagctgagcactaaaggaatttctaaggacatttggttttactgctttttctctgcttccagttggagttgattcatgtgcttgtgcctacctggccgcaagtccccagcccctcaaccctccgttcctcctcagcctccctttgccagccacccctcctctagctctggtgggaggcccggggcccttcctcgcacagggcatgcctggcctgaggacccggcgctgagtggcggggcccctgctccgaggggctcatgttcaggcagaaccggtcccagcctgggctcctctgcatcttgctctgtgccttggccctgacccccatcgctctgagcatatgttccatgcctgccttgccggggcctggactgcacaggcagcaaggtcatggtctgagtggggcttcctgggcagttggggcggcccacgccagctggcccagtgggtagtgaattggcttccttgacgcgagaggctctgagggtctgaaaagggcatctcaatggcatgggtgggtggggagtcagtcatgtcactgaaattgaatgggggaggcccaatgaggtggctcatgcctgtaatcccagcactttgggaagctgaggcaggaggatcacctgaggtcaggagttcgagagcagcctggccaacatggcaaaaccccttatttactaaaaatacaaaaacttagccgggcatggtggcatgtgcctgtattcccagctactcatgaggctgaggcaggagaatggcgtgaacccgggagtggagcttgcaatgagccaagattgcgccactgcactccagcctgggtgacagagcaagactccgtctcaaaaaaaaaaaaaaaaaaaaagaaattaattgggggagtcatggtcaggggtgagacctgaaggacctccccctgtgtggccctggacacagcccaccctctgtgagccgtttccaattctaaaacagactcaatgtccccctcacccccacctcaaggtcaggatgcgaacacactgagtgaggagtggacgctgtccattgccacggccatgagggctggagaccagaacagcatggcccgaagcgtgcggggccccggatgacttggggacaccccagaatcccctggggagaacccttcctgcgcgctttcattttttgacctcatcactgagaaaggctcaatttggtgctcacgtgtccttaacacctgatctggcccaagctgcgtgccctttaagccaagagagcctcttgtggaccccgcctgcccgaatgaaatccgaacagttggggctgttatggcaagtggggctggtttttcatttccattggttatttaaagtttcctttaaaataaacgattttaagttataaaaggtgaatctattgaaagaagaacatcaaagaaataaacaggagttcagcggagtagcagaagacaaggcatgtagggggagccattctgtcccag

SEQ ID NO: 226 - DNA, 2402 bp, Homo sapiens
gctgactcacctgtactctcacctgaagtgtagccccctgtgccctgtgccccgcctcatcattacccctgagacccctgagcctgaggcccagccagtgggacccccctcccgggttgaggggggcagcggcggcttctcctctgcctcttctttcgacgagtctgaggatgacgtggtggccgggggcggaggtgccagcgatcccgaggacaggtctgggagcaaaccctggaagaagctgaagacagttctgaagtattcaccctttgtggtctccttccgaaaacactacccttgggtccagctttctggacatgctgggaacttccaggcaggagaggatggtcggattctgaaacgtttctgtcagtgtgagcagcgcagcctggagcagctgatgaaagacccgctgcgacctttcgtgcctgcctactatggcatggtgctgcaggatggccagaccttcaaccagatggaagacctcctggctgactttgagggcccctccattatggactgcaagatgggcagcaggacctatctggaagaggagctagtgaaggcacgggaacgtccccgtccccggaaggacatgtatgagaagatggtggctgtggaccctggggcccctacccctgaggagcatgcccagggtgcagtcaccaagccccgctacatgcagtggagggaaaccatgagctccacctctaccctgggcttccggatcgagggcatcaagaaggcagatgggacctgtaacaccaacttcaagaagacgcaggcactggagcaggtgacaaaagtgctggaggacttcgtggatggagaccacgtcatcctgcaaaagtacgtggcatgcctagaagaacttcgtgaagctctggagatctcccccttcttcaagacccacgaggtggtaggcagctccctcctcttcgtgcacgaccacaccggcctggccaaggtctggatgatagacttcggcaagacggtggccttgcccgaccaccagacgctcagccacaggctgccctgggctgagggcaaccgtgaggacggctacctctggggcctggacaacatgatctgcctcctgcaggggctggcacagagctgagctgctcagccaccatcaggttaattggatggcgccagtctggctggaggagccctgagatgccatgggaggcctgaggttggccacgggggagctggcctccagggacgggagagattgtgtcatgtgccacacgagaccaacgtggaaaagtctgaagggccttgggagaccaggtagcacctggccccatcatgatgcaggggttttggggacctggaaggaaggtgatgaggcagtgagtcagaaaaaccagaacggggtccccggatctgccgggaaggcttctgaggggctgccctgagagcattcagttcacatgtcacagggtatggtgtgacagggtgcctgtggacacatgaatcacttctaacctgcctccctgtcagcctccaggctgccagctggctgaggccagggactgggtcaggctcatctgtggcgcctcagagggtcagcatcattggtgaacagatgcaggcgctgctggaccatctggggagagtgacagtccatgtcttcaccagggagccatttgagtgctgagcgacaagaggctcagagggcatgaccccatgggactggatgcggcctgagggctgataccgctgggcggtatcctgccctgctgtggccctgtgggatcctccgtgttcctcggcggactctgctgacctcctgcagacccaaaccacagccacatcccagcttctgtgccagcactgtgacagtacctcgctcctctgtgcaccagatccggcctcaggacttacacctcctgcctgacccccaggcttctctctcctttctcccagcaaactgcagtggcagaaaggaggttcagaggctgggaaagtgggcctccccttgcaactcagagctgctgcactcaggagggccccatccaatcccgggcccctgcagggaaaagcgctgggtgtgtgtcagaggcgcagggtgggtggggctgccagccaggaccctggcctgcagcctgatccaaaccaaagactgtagaaccctggggtgtggctaacggcccctccagcacccatagccaggtcttcctggcccttgaggctgggctggcggacaggcacctacctcttccttaagctgaagctcccacactgtcttccagggctgaggagatgctctccttttctactgaccatcttgatacttatttatacgagaggcagttgctggacggggtagtactgggaagcaggaggcagaatggctctgctgagcctcctacccatgacaacaccccaataaa

SEQ ID NO: 227 - DNA, 2052 bp, Homo sapiens
atgaggcgctgcccgtgccgtgggagcctgaacgaggcggaggccggggcgctgcccgcggcggcccgcatgggactggaggcgccgcgaggagggcggcggcggcagccgggacagcagcgacctgggcccggcgcaggggccccggcggggcggccggaggggggcgggccctgggcccggacagaggggtccagcctccacagcgagcctgagagggccggcctcgggcctgcgccggggacagagagtccgcaggcagaattctggacagacggacagactgagcccgcggcagctggccttggagtagagaccgagaggcccaagcaaaagacggagccagacaggtccagcctccggacgcatctagaatggagctggtcagagctggagacgacttgtctttggacggagaccgggacagatggcctttggactgatccgcacaggtccgacctccagtttcagcccgaggaggccagcccctggacacagccaggggttcatgggccctggacagagctggaaacgcatgggtcacagactcagccagagagggtcaagtcctgggctgataacctctggacccaccagaacagttccagcctccagactcacccagaaggagcctgtccctcaaaagagccaagtgctgatggctcctggaaagaattgtatactgatggctccaggacacaacaggatattgaaggtccctggacagagccatatactgatggctcccagaaaaaacaggatactgaagcagccaggaaacagcctggcactggtggtttccaaatacaacaggatactgatggctcctggacacaacctagcactgacggttcccagacagcacctgggacagactgcctcttgggagagcctgaggatggcccattagaggaaccagagcctggagaattgctgactcacctgtactctcacctgaagtgtagccccctgtgccctgtgccccgcctcatcattacccctgagacccctgagcctgaggcccagccagtgggacccccctcccgggttgaggggggcagcggcggcttctcctctgcctcttctttcgacgagtctgaggatgacgtggtggccgggggcggaggtgccagcgatcccgaggacaggtctgggagcaaaccctggaagaagctgaagacagttctgaagtattcaccctttgtggtctccttccgaaaacactacccttgggtccagctttctggacatgctgggaacttccaggcaggagaggatggtcggattctgaaacgtttctgtcagtgtgagcagcgcagcctggagcagctgatgaaagacccgctgcgacctttcgtgcctgcctactatggcatggtgctgcaggatggccagaccttcaaccagatggaagacctcctggctgactttgagggcccctccattatggactgcaagatgggcagcaggacctatctggaagaggagctagtgaaggcacgggaacgtccccgtccccggaaggacatgtatgagaagatggtggctgtggaccctggggcccctacccctgaggagcatgcccagggtgcagtcaccaagccccgctacatgcagtggagggaaaccatgagctccacctctaccctgggcttccggatcgagggcatcaagaaggcagatgggacctgtaacaccaacttcaagaagacgcaggcactggagcaggtgacaaaagtgctggaggacttcgtggatggagaccacgtcatcctgcaaaagtacgtggcatgcctagaagaacttcgtgaagctctggagatctcccccttcttcaagacccacgaggtggtaggcagctccctcctcttcgtgcacgaccacaccggcctggccaaggtctggatgatagacttcggcaagacggtggccttgcccgaccaccagacgctcagccacaggctgccctgggctgagggcaaccgtgaggacggctacctctggggcctggacaacatgatctgcctcctgcaggggctggcacagagctga

SEQ ID NO: 228 - DNA, 7654 bp, Homo sapiens
actcactatagggctcgagcggccgcccgggcaggtaagaatcagaagacatttgtgctttggggagcagaggccctcagggtatagagaaggaagaagagagaggttcactgtagtcctgaagcagaaataagacctgtggctgaaggaagccttagcaattcactccttcctcttcctgagaactctctgtaggaagtctcacctagcagaggcttcacagtatttcagagaagccaaagattgtttgcctctttggaaactgttatccttccatcatgactgtgtcactcctgccactgttccaccatagagatggcgtcctttgcagcaaaccgtaagttataaggatgagggaagaagagtagagggccaaaaggattccattttgaggaaaaactacagtttgccttgccaggtagaagaatcaggcgcccagacaccatgtcacaaccctccagaactgacgttggcaggaagtagagactttgttgcctgtgtcccccatcctcaccatgtcttcgactcaggacaatggggaacactggaagtccctggagtctgtgggcatcagccgcaaagaactagcgatggccgaagccctgcagatggagtatgatgccctgtcccggctccggcatgacaaggaggagaacagagccaagcagaacgcagacccctctctcatcagctgggatgagcctggggtagacttttacagcaagccagcaggaaggcggaccgacctcaagctgttacgcggtctctctggctctgatcctacccttaactacaactcactatccccacaggaagggccgcccaaccactctacctcccaagggccacagcctggctcagatccctggcccaaaggctccctgtctggagactatctctacatttttgatggttcagatgggggagtctcttcgtccccaggaccaggggacatagagggctcttgcaagaaactatccccacctcctctgcctccccgagcttctatctgggatacccctcccctgcctcccagaaaggggtccccctcatcctccaagatctcccagcccagtgacatcaacactttctctttggtcgaacaattgccaggcaaactgctagagcatcggatcctagaagaggaagaggtgctgggaggtgggggtcaggggcgcctactggggtctgtggactatgatggtatcaatgatgcaattactaggctcaacttgaaatcgacctatgatgtggagatgttgcgggatgccaccaggggctggaaggagggccgagggccgctggacttcagcaaagacacctctggaaaacccgtggccaggagcaagactatgccccctcaggtgcccccccgcacctatgcctcccgctatggcaaccgaaagaatgcgacgcctggcaagaaccgccggatttctgcagccccggtgggctcccggccccacactgttgccaatggccatgagttgtttgaggtctcagaagagagagatgaggaggttgctgcattttgccacatgctggatatccttcgatctggctctgacatccaagactacttcctcactggctatgtctggagtgctgtcacccctagcccagagcacctcggggatgaggtcaacctgaaggtgactgtgttgtgtgacaggcttcaagaggcactcactttcacctgcaactgttcctccactgtagacttgcttatctaccagaccctgtgctacacccatgatgacctgaggaatgtggacgtgggtgactttgtgctaaagccctgcgggctggaggagttcctgcagaacaagcatgccttgggcagtcatgagtacatccaatactgccgcaagtttgacattgacattcggctacagctgatggagcagaaggttgtgcgcagtgacctggcccggacggtgaatgatgaccagagcccctccaccttgaactacctcgtccatctccaagagaggcctgtcaagcagaccatcagcaggcaggccctgagtcttctgttcgacacttaccacaatgaggtggatgccttcctgctggctgatggagacttcccactgaaggctgacagggtggtccagtccgtcaaggccatctgcaacgccctggccgccgtggaaacccctgagatcaccagtgctctcaaccagctgcccccctgcccctcccgcatgcagcctaaaattcagaaggatcccagtgtcttggctgtgagggaaaaccgagagaaggtcgtggaagccctgaccgctgccatcttggacctggtggagctgtactgcaacacattcaacgcagacttccagacggcagtgcccgggagccgcaagcatgacctggtccaggaggcctgccatttcgccaggtccctggccttcactgtctatgccacccaccgcatccccatcatctgggctaccagctatgaagatttctacctctcctgctccctcagccatggcggcaaggacatgtgcagccccctgcagacccgaagagctcacttctccaagtacctcttccacctcatcgtctgggaccagcagatctgcttcccagtgcaggtgaaccggctgcctcgggagacactgctgtgtgccactctctatgctctgcccatccccccaccggggagctcctcagaggccaataagcagcggcgggtgcctgaagccctgggctgggtcactaccccactcttcaacttcaggcaggtcctgacctgtggccggaagcttctgggtttgtggccagcaacacaggaaaatcccagcgcccgttggagtgcacctaatttccaccagccagacagtgtcatcctgcagattgacttccccacctcggcctttgacatcaagttcaccagcccccctggagacaagttcagcccccgctatgagtttggcagcctccgggaagaagaccagcgcaagcttaaagacatcatgcagaaagagtccttgtactggctcactgatgctgacaagaagcgcctgtgggagaagcgatattactgccactcggaggtgagctcgctccccctggtgctcgccagcgcccccagctgggagtgggcttgcctgcctgacatctatgttctcctgaagcagtggacccacatgaaccaccaggatgccctggggctcctgcatgccaccttcccggaccaggaggtgcgtcgtatggctgtgcagtggattggctcactctcagatgctgagctgctagactacctgccccagctggtacaggccctgaagtatgaatgctacctggacagcccgttggtgcgcttcctcctgaaacgagctgtgtctgacttgagagtgactcactacttcttctggttactgaaggacggcctcaaggactctcagttcagcatccgctaccagtatctgctggcagccttactgtgctgctgtggcaaggggctgagagaagagtttaaccgccagtgctggcttgtcaatgccctggccaaactggcccagcaggtccgggaggcagccccatctgcaaggcagggaatcctccgcacgggcctggaggaggtgaagcagttctttgccctcaatggctcgtgccgcttgccactcagccccagtctgctggttaagggaattgtgcccagggactgttcctacttcaactccaatgctgtccccctcaaactctccttccaaaatgtggatcccctgggtgagaacatccgtgtcatcttcaagtgtggggacgaccttcgccaggacatgctaacgctgcagatgattcgcatcatgagcaagatctgggtccaggaggggctggacatgcgcatggtcatcttccgctgcttctccaccggccggggcagagggatggtggagatgatccctaatgctgagaccctgcgtaagatccaggtggagcatggggtgaccggctcgttcaaggaccggcccctggcagactggctgcagaaacacaaccctggggaggacgagtatgagaaggctgtggagaactttatctactcctgcgctggctgctgcgtggccacgtacgtcttgggcatctgtgaccgacataatgacaacatcatgctgaagaccactggtcacatgttccacattgattttggccgcttcctgggccatgcccagatgtttggcaacatcaagcgggaccgtgccccctttgtcttcacctcggacatggcgtatgtcatcaacgggggtgacaagccttccagccgcttccatgattttgttgacctttgctgccaagcctacaacctcattcgcaagcacacccacctcttcctcaaccttctgggcctgatgttgtcctgtgggatccctgaactctcagacctggaggacctcaagtatgtgtacgatgccctgaggcctcaggatacagaggccaatgccactacctacttcactaggttgattgagtccagcctgggcagtgtagccacaaagctcaattttttcatccataatctggctcagatgaagttcacgggctcagatgaccggctgaccctctcctttgcctcccgaacacacactctcaagagctctggccgaatcagtgatgttttcctctgccgccatgagaagatcttccaccccaacaaaggctatatatatgtggtaaaggtgatgcgagagaacactcacgaggccacctacatccagcggacctttgaggagttccaggaattacacaataagttgcggctgctcttcccttcttcccacttgcccagcttccctagtcgcttcgtgatcggccgctcccggggagaggcggtggccgagcggcggagggaggagctaaacggttacatctggcacttgatccacgcaccccctgaggtggccgagtgtgatttggtgtacaccttcttccacccactgccccgggatgagaaggctatgggcaccagcccagctcctaagtcctcagatggcacatgggcccggcccgtcggaaaggtgggaggggaggtgaagctgtccatctcctacaaaaacaataaactcttcatcatggtgatgcatattcggggcttgcaactgctccaggatggaaatgaccctgacccctatgtgaaaatttacctccttcctgaccctcagaaaaccactaagaggaaaaccaaagtggcccggaaaacctgcaatcctacctacaatgagatgttggtatatgatgggatccccaagggtgacctgcagcagcgggagctccagctgagcgtgctgagtgagcagggattctgggagaacgtcctcctcggtgaggtgaacatccgcctgcgagagctggacctggctcaggagaagaccggctggttcgccctgggatctcgaagtcatggcaccttgtgagcccagcagagccaccacccagcatcccaggctggtggcaggagctgggggagaggactctcccctgtgagactcctccttgtgaagggccagggccctgggcaggcctccagctcggtccaggtgattctggcctctgtggtaggaggcagggagagtaagacatgctctgctgtctcttcctctggagactgaacttgggttggttgtgatgagcagccccttggaggctgtgaggttgcagcaaagttttaagtttaccttgtgtcaagggagcaatgcttggtttggggaatgtgtggggtgggctgtatgaagtaccattttgggggtgggtgggtggatatcttaatttttatttttaaaaaatgaaatagtgatgttgtcctaactgggacaggaagccttgcgagaagggacgtacctatgccccacaaggcaagagaggaacactatttggactttttgtatgattaaggttcttattggacttttccctaggttttttttttttgttattgttgttgttgttccgttttctagctataggaactatctggggaggggcccagtgggtcctcggccagagccctctctaaggacaggttggggagggttggggagggctgcctgtgctggactgaggcttgtgccactgggcctttctgattttgcctccaaaggagagcgctgtgatacctacatgtgtaaggaagggccttccgtattggggttctgccaaggacccgtattcagggacccatgctcttttggggggacttttcctcttgtcttccctactttattaggacttgccctgaataccattttctaccccttgcccctccattctcctggcccttctgggggtcagctggtctctatgaatatgctgggggtgcttccccataggtctctcccttcatttgtctctggtgggacaaaatactgactcagtccttagatgtagtttcacccaagagcatcttggccctgggaagaggtccctaggctgcagatgctactgactgcttgctaggtagcctctggaaagcattccccatccatcactccccacttctttctgctgtgctgcttccctcccaaactccatttctgtcaccctttttataagacttttcctcattctgtggggccataaacctatttagtctggagccaaagggatgccctatctgaaggaaaggggcatggggtgggggattccatcaaaactgttgttttttgccccatgatttttctttggtcagtaggaggctggattggagtggtgattattcccctggagctaagctcaggagcccgaagggagagactgagactgactcccttatctcttcatattctttattccctaccagatggatttttttttttttttttggagacggagtctcgccctgtcgccaggctggagtgtagtggcatgatctcgactcactgcaaaatctgcctcccgggttcaagcgattctcctacctcagcctcccgagtagctgggattacaggcatgtgccaccacgccaagctaatttttgtatttttagtagagacggggtttcaccatgttggccaggatggtctcgatctcttgacctcgtgatctgcctgccttggcctcccaaagtgctgggattacaggcgtgagccaccatgccccgccccagatggattttacatttgctcttttgtgtttcgctccaaagggttgtcttcctcgccaaaaggagggagggactttgaatttgatatgaatctttaaaaccagaattggctggatatttcccatgattgggaaaagagtgaaatgaggacattctgtaaactgtccctccctaattccaaggatcagaaactccccgttttgctgactcattccataactggagaaagaagctccattgaccgaagccacagggcagcatggaagtttaaattttctctaaaattaaaatgccaaggataaagctggctgcttccaggagggggaagaggagtggggagtgggcggtgaaacttttccagatgaacggaccataaatgtgttactggctttgtgcctgtagctcattttattatgacctatatgctcctgatttaaagagatctgtgtactgtttacttcccacttcccagaatcccttgtatctcctttctcgggaattgtattttctaataaatgacatttgagaaaaaaaaaaaaaaaaaaaaaa

SEQ ID NO: 229 - DNA, 5316 bp, Homo sapiens
atcatggcggatggccccaggtgtaagcgcagaaagcaggcgaacccgcggcgcaataacgttacaaattataatactgtggtagaaacaaattcagattcagatgatgaagacaaactgcatattgtggaagaagaaagtgttacagatgcagctgactgtgaaggtgtaccagaggatgacctgccaacagaccagacagtgttaccagggaggagcagtgaaagagaagggaatgctaagaactgctgggaggatgacagaaaggaagggcaagaaatcctggggcctgaagctcaggcagatgaagcaggatgtacagtaaaagatgatgaatgcgagtcagatgcagaaaatgagcaaaaccatgatcctaatgttgaagagtttctacaacaacaagacactgctgtcatttttcctgaggcacctgaagaggaccagaggcagggcacaccagaagccagtggtcatgatgaaaatggaacaccagatgcattttcacaattactcacctgtccatattgtgatagaggctataaacgctttacctctctgaaagaacacattaaatatcgtcatgaaaagaatgaagataactttagttgctccctgtgcagttacacctttgcatacagaacccaacttgaacgtcacatgacatcacataaatcaggaagagatcaaagacatgtgacgcagtctgggtgtaatcgtaaattcaaatgcactgagtgtggaaaagctttcaaatacaaacatcacctaaaagagcacttaagaattcacagtggagagaagccatatgaatgcccaaactgcaagaaacgcttttcccattctggctcctatagctcacacataagcagtaagaaatgtatcagcttgatacctgtgaatgggcgaccaagaacaggactcaagacatctcagtgttcttcaccgtctctttcagcatcaccaggcagtcccacacgaccacagatacggcaaaagatagagaataaaccccttcaagaacaactttctgttaaccaaattaaaactgaacctgtggattatgaattcaaacccatagtggttgcttcaggaatcaactgttcaacccctttacaaaatggggttttcactggtggtggcccattacaggcaaccagttctcctcagggcatggtgcaagctgttgttctgccaacagttggtttggtgtctcccataagtatcaatttaagtgatattcagaatgtacttaaagtggcggtagatggtaatgtaataaggcaagtgttggagaataatcaagccaatcttgcatccaaagaacaagaaacaatcaatgcttcacccatacaacaaggtggccattctgttatttcagccatcagtcttcctttggttgatcaagatggaacaaccaaaattatcatcaactacagtcttgagcagcctagccaacttcaagttgttcctcaaaatttaaaaaaagaaaatccagtcgctacaaacagttgtaaaagtgaaaagttaccagaagatcttactgttaagtctgagaaggacaaaagctttgaagggggggtgaatgatagcacttgtcttctgtgtgatgattgtccaggagatattaatgcacttccagaattaaagcactatgacctaaagcagcctactcagcctcctccactccctgcagcagaagctgagaagcctgagtcctctgtttcatcagctactggagatggcaatttgtctcctagtcagccacctttaaagaacctcttgtctctcctaaaagcatattatgctttgaatgcacaaccaagtgcagaagagctctcaaaaattgctgattcagtaaacctaccactggatgtagtaaaaaagtggtttgaaaagatgcaagctggacagatttcagtgcagtcttctgaaccatcttctcctgaaccaggcaaagtaaatatccctgccaagaacaatgatcagcctcaatctgcaaatgcaaatgaaccccaggacagcacagtaaatctacaaagtcctttgaagatgactaactccccagttttaccagtgggatcaaccaccaatggttccagaagtagtacaccatccccatcacctctaaacctttcctcatccagaaatacacagggttacttgtacacagctgagggtgcacaagaagagccacaagtagaacctcttgatctttcactaccaaagcaacagggagaattattagaaaggtcaactatcactagtgtttaccagaacagtgtttattctgtccaggaagaacccttgaacttgtcttgcgcaaaaaaggagccacaaaaggacagttgtgttacagactcagaaccagttgtaaatgtaatcccaccaagtgccaaccccataaatatcgctatacctacagtcactgcccagttacccacaatcgtggccattgctgaccagaacagtgttccatgcttaagagcgctagctgccaataagcaaacgattctgattccccaggtggcatacacctactcaactacggtcagccctgcagtccaagaaccacccttgaaagtgatccagccaaatggaaatcaggatgaaagacaagatactagctcagaaggagtatcaaatgtagaggatcagaatgactctgattctacaccgcccaaaaagaaaatgcggaagacagaaaatggaatgtatgcttgtgatttgtgtgacaagatattccaaaagagtagttcattattgagacataaatatgaacacacaggtaaaagacctcatgagtgtggaatctgtaaaaaggcatttaaacacaaacatcatttgattgaacacatgcgattacattctggagaaaagccctatcaatgtgacaaatgtggaaagcgcttctcacactctgggtcttattctcaacacatgaatcatcgctactcctactgtaagagagaagcggaagaacgtgacagcacagagcaggaagaggcagggcctgaaatcctctcgaatgagcacgtgggtgccagggcgtctccctcacagggcgactcggacgagagagagagtttgacaagggaagaggatgaagacagtgaaaaagaggaagaggaggaggataaagagatggaagaattgcaggaagaaaaagaatgtgaaaaaccacaaggggatgaggaagaggaggaggaggaggaagaagtggaagaagaagaggtagaagaggcagagaatgagggagaagaagcaaaaactgaaggtctgatgaaggatgacagggctgaaagtcaagcaagcagcttaggacaaaaagtaggcgagagtagtgagcaagtgtctgaagaaaagacaaatgaagcctaatcgtttttctagaaggaaaataaattctaattgataatgaatttcgttcaatattatccttgcttttcatggaaacacagtaacctgtatgctgtgattcctgttcactactgtgtgtgtgtgcgcgtgcattgattactatccatttctttagtcaacgctctccacttcctgatttctgctttaaggaaaactgtgaactttctgcttcatgtatcagttttaaagcatcccaggcaaagatcatctacagattctaggaattctctcccctgaaatcaaaacctggagacttttttttcttattttagttgagaagttcataaactgctcaaggattagttttccaggactctgcggaggaacggcaggaagaacctcagagagggcagaggtgacttcaaagtgctggggactccgtcctgagggtcacttggccctgagcccctgcgtgcccttgcggaagcccagaagcttcttcctgctgcacctcccgtttccgctgctgctgacgtttatgcatttcatgatggggtccaacaagaacacctgacttgggtgaagttgtgcaatattggaggctgactgtagggctgggcagctgggagacaggctcatggctcatggctcatggctcagggcggtgcctgccctgggccgggacccccctccccaccccccacctaggctttttgggttttgttcaaggaaggtaaagtgagaggtttaggtcagtgtttttaagtttttgttttttttttaaagcaaatcctgtatatgtatctacatgggagataggtagacactacttatttgttacattttgtactatacgtttgtgttccaggtttcagcttccctcgctcctgttgttaagaagcgtccctgtcagcacaggtgtgcattgaggaaggggccccagggccttcgctccctcagcactggggtggaggcggcaggaaggggcggcccttacctggcaggtctgggcgcacctttagcaggtggactccgtggggctccaccagccagaagcctctggaaggcaacgaaggcaatgctgctccctgagtccagtccccgcccccaaacccagcccaggtgccttcagctacttcggcttcttaaaccctgcagtgttaaacagaggcattgagaaaggggaaaggcgggtatttttaaaagccaaagattgacccaagttacttgagggtagggaggcgggcccagtgcaggaggctgcatccctggcctgctggtgcccaccgggggctgtgcctgtgccgggccgcaggaagctggctgcccccattcctgctgctgctgctgctgctgctctgtggctgtttcaaagactgggcgaaaggctgtccggagggcagaccaggtgccttgccgcagagaaaacaccaaagtctcctgttcgctcataaagaagtttttgggatgggagagaatccagaccatcttggggcagccaggcccttgccttcatttttacagaggtagcacaactgattccaacacaaaaccccttcccctttttaaaatgatttctgttctaatgccatagatcaaaggcctcagaaaccattgtgtgtttcctctttgaagcaatgacaagcactttactttcacggtggtttttgttttttcttattgctgtggaacctcttttggaggacgttaaaggcgtgttttacttgtttttttaagagtgtgtgatgtgtgttttgtagatttcttgacagtgctgtaatacagacggcaatgcaatagcctatttaaagaactacgtgatctgattgagatgtacatagtttttttttttaccataactgaattattttatctcttatgttatcatgagaaatgtatgccaaatgattagttgatgtatgttttttaatttaatatttaaataaaatatttggaagg

SEQ ID NO: 230 - DNA, 3433 bp, Homo sapiens
ttacaaattataatactgtggtagaaacaaattcagattcagatgatgaagacaaactgcatattgtggaagaagaaagtgttacagatgcagctgactgtgaaggtgtaccagaggatgacctgccaacagaccagacagtgttaccagggaggagcagtgaaagagaagggaatgctaagaactgctgggaggatgacagaaaggaagggcaagaaatcctggggcctgaagctcaggcagatgaagcaggatgtacagtaaaagatgatgaatgcgagtcagatgcagaaaatgagcaaaaccatgatcctaatgttgaagagtttctacaacaacaagacactgctgtcatttttcctgaggcacctgaagaggaccagaggcagggcacaccagaagccagtggtcatgatgaaaatggaacaccagatgcattttcacaattactcacctgtccatattgtgatagaggctataaacgctttacctctctgaaagaacacattaaatatcgtcatgaaaagaatgaagataactttagttgctccctgtgcagttacacctttgcatacagaacccaacttgaacgtcacatgacatcacataaatcaggaagagatcaaagacatgtgacgcagtctgggtgtaatcgtaaattcaaatgcactgagtgtggaaaagctttcaaatacaaacatcacctaaaagagcacttaagaattcacagtggagagaagccatatgaatgcccaaactgcaagaaacgcttttcccattctggctcctatagctcacacataagcagtaagaaatgtatcagcttgatacctgtgaatgggcgaccaagaacaggactcaagacatctcagtgttcttcaccgtctctttcagcatcaccaggcagtcccacacgaccacagatacggcaaaagatagagaataaaccccttcaagaacaactttctgttaaccaaattaaaactgaacctgtggattatgaattcaaacccatagtggttgcttcaggaatcaactgttcaacccctttacaaaatggggttttcactggtggtggcccattacaggcaaccagttctcctcagggcatggtgcaagctgttgttctgccaacagttggtttggtgtctcccataagtatcaatttaagtgatattcagaatgtacttaaagtggcggtagatggtaatgtaataaggcaagtgttggagaataatcaagccaatcttgcatccaaagaacaagaaacaatcaatgcttcacccatacaacaaggtggccattctgttatttcagccatcagtcttcctttggttgatcaagatggaacaaccaaaattatcatcaactacagtcttgagcagcctagccaacttcaagttgttcctcaaaatttaaaaaaagaaaatccagtcgctacaaacagttgtaaaagtgaaaagttaccagaagatcttactgttaagtctgagaaggacaaaagctttgaagggggggtgaatgatagcacttgtcttctgtgtgatgattgtccaggagatattaatgcacttccagaattaaagcactatgacctaaagcagcctactcagcctcctccactccctgcagcagaagctgagaagcctgagtcctctgtttcatcagctactggagatggcaatttgtctcctagtcagccacctttaaagaacctcttgtctctcctaaaagcatattatgctttgaatgcacaaccaagtgcagaagagctctcaaaaattgctgattcagtaaacctaccactggatgtagtaaaaaagtggtttgaaaagatgcaagctggacagatttcagtgcagtcttctgaaccatcttctcctgaaccaggcaaagtaaatatccctgccaagaacaatgatcagcctcaatctgcaaatgcaaatgaaccccaggacagcacagtaaatctacaaagtcctttgaagatgactaactccccagttttaccagtgggatcaaccaccaatggttccagaagtagtacaccatccccatcacctctaaacctttcctcatccagaaatacacagggttacttgtacacagctgagggtgcacaagaagagccacaagtagaacctcttgatctttcactaccaaagcaacagggagaattattagaaaggtcaactatcactagtgtttaccagaacagtgtttattctgtccaggaagaacccttgaacttgtcttgcgcaaaaaaggagccacaaaaggacagttgtgttacagactcagaaccagttgtaaatgtaatcccaccaagtgccaaccccataaatatcgctatacctacagtcactgcccagttacccacaatcgtggccattgctgaccagaacagtgttccatgcttaagagcgctagctgccaataagcaaacgattctgattccccaggtggcatacacctactcaactacggtcagccctgcagtccaagaaccacccttgaaagtgatccagccaaatggaaatcaggatgaaagacaagatactagctcagaaggagtatcaaatgtagaggatcagaatgactctgattctacaccgcccaaaaagaaaatgcggaagacagaaaatggaatgtatgcttgtgatttgtgtgacaagatattccaaaagagtagttcattattgagacataaatatgaacacacaggtaaaagacctcatgagtgtggaatctgtaaaaaggcatttaaacacaaacatcatttgattgaacacatgcgattacattctggagaaaagccctatcaatgtgacaaatgtggaaagcgcttctcacactctgggtcttattctcaacacatgaatcatcgctactcctactgtaagagagaagcggaagaacgtgacagcacagagcaggaagaggcagggcctgaaatcctctcgaatgagcacgtgggtgccagggcgtctccctcacagggcgactcggacgagagagagagtttgacaagggaagaggatgaagacagtgaaaaagaggaagaggaggaggataaagagatggaagaattgcaggaagaaaaagaatgtgaaaaaccacaaggggatgaggaagaggaggaggaggaggaagaagtggaagaagaagaggtagaagaggcagagaatgagggagaagaagcaaaaactgaaggtctgatgaaggatgacagggctgaaagtcaagcaagcagcttaggacaaaaagtaggcgagagtagtgagcaagtgtctgaagaaaagacaaatgaagcctaatcgtttttctagaaggaaaataaattctaattgataatgaatttcgttcaatattatccttgcttttcatggaaacacagtaacctgtatgctgtgattcctgttcactactgtgt

SEQ ID NO: 231 - DNA, 3625 bp, Homo sapiens
ggccaccggagcggcccggcgacgatcgctgacagcttcccctgcccttcccgtcggtcgggccgccagccgccgcagccctcggcctgcacgcagccaccggccccgctcccggagcccagcgccgccgaggccgcagccgcccggccagtaaggcggcgccgcccgcggccaccgcgggccctgccgttccctccgccgcgctgcgccatggcgcggcgctgactggcctggcccggccccgccgcgctcccgctcgccccgacccgcactcgggcccgcccgggctccggcctgccgccgcctcttccttctccagccggcaggccccgccgcttaggagggagagcccacccgcgccaggaggccgaacgcggactcgccacccggcttcagaatggcagaagatgatccatatttgggaaggcctgaacaaatgtttcatttggatccttctttgactcatacaatatttaatccagaagtatttcaaccacagatggcactgccaacagatggcccataccttcaaatattagagcaacctaaacagagaggatttcgtttccgttatgtatgtgaaggcccatcccatggtggactacctggtgcctctagtgaaaagaacaagaagtcttaccctcaggtcaaaatctgcaactatgtgggaccagcaaaggttattgttcagttggtcacaaatggaaaaaatatccacctgcatgcccacagcctggtgggaaaacactgtgaggatgggatctgcactgtaactgctggacccaaggacatggtggtcggcttcgcaaacctgggtatacttcatgtgacaaagaaaaaagtatttgaaacactggaagcacgaatgacagaggcgtgtataaggggctataatcctggactcttggtgcaccctgaccttgcctatttgcaagcagaaggtggaggggaccggcagctgggagatcgggaaaaagagctaatccgccaagcagctctgcagcagaccaaggagatggacctcagcgtggtgcggctcatgtttacagcttttcttccggatagcactggcagcttcacaaggcgcctggaacccgtggtatcagacgccatctatgacagtaaagcccccaatgcatccaacttgaaaattgtaagaatggacaggacagctggatgtgtgactggaggggaggaaatttatcttctttgtgacaaagttcagaaagatgacatccagattcgattttatgaagaggaagaaaatggtggagtctgggaaggatttggagatttttcccccacagatgttcatagacaatttgccattgtcttcaaaactccaaagtataaagatattaatattacaaaaccagcctctgtgtttgtccagcttcggaggaaatctgacttggaaactagtgaaccaaaacctttcctctactatcctgaaatcaaagataaagaagaagtgcagaggaaacgtcagaagctcatgcccaatttttcggatagtttcggcggtggtagtggtgccggagctggaggcggaggcatgtttggtagtggcggtggaggagggggcactggaagtacaggtccagggtatagcttcccacactatggatttcctacttatggtgggattactttccatcctggaactactaaatctaatgctgggatgaagcatggaaccatggacactgaatctaaaaaggaccctgaaggttgtgacaaaagtgatgacaaaaacactgtaaacctctttgggaaagttattgaaaccacagagcaagatcaggagcccagcgaggccaccgttgggaatggtgaggtcactctaacgtatgcaacaggaacaaaagaagagagtgctggagttcaggataacctctttctagagaaggctatgcagcttgcaaagaggcatgccaatgcccttttcgactacgcggtgacaggagacgtgaagatgctgctggccgtccagcgccatctcactgctgtgcaggatgagaatggggacagtgtcttacacttagcaatcatccaccttcattctcaacttgtgagggatctactagaagtcacatctggtttgatttctgatgacattatcaacatgagaaatgatctgtaccagacgcccttgcacttggcagtgatcactaagcaggaagatgtggtggaggatttgctgagggctggggccgacctgagccttctggaccgcttgggtaactctgttttgcacctagctgccaaagaaggacatgataaagttctcagtatcttactcaagcacaaaaaggcagcactacttcttgaccaccccaacggggacggtctgaatgccattcatctagccatgatgagcaatagcctgccatgtttgctgctgctggtggccgctggggctgacgtcaatgctcaggagcagaagtccgggcgcacagcactgcacctggctgtggagcacgacaacatctcattggcaggctgcctgctcctggagggtgatgcccatgtggacagtactacctacgatggaaccacacccctgcatatagcagctgggagagggtccaccaggctggcagctcttctcaaagcagcaggagcagatcccctggtggagaactttgagcctctctatgacctggatgactcttgggaaaatgcaggagaggatgaaggagttgtgcctggaaccacgcctctagatatggccaccagctggcaggtatttgacatattaaatgggaaaccatatgagccagagtttacatctgatgatttactagcacaaggagacatgaaacagctggctgaagatgtgaagctgcagctgtataagttactagaaattcctgatccagacaaaaactgggctactctggcgcagaaattaggtctggggatacttaataatgccttccggctgagtcctgctccttccaaaacacttatggacaactatgaggtctctgggggtacagtcagagagctggtggaggccctgagacaaatgggctacaccgaagcaattgaagtgatccaggcagcctccagcccagtgaagaccacctctcaggcccactcgctgcctctctcgcctgcctccacaaggcagcaaatagacgagctccgagacagtgacagtgtctgcgacacgggcgtggagacatccttccgcaaactcagctttaccgagtctctgaccagtggtgcctcactgctaactctcaacaaaatgccccatgattatgggcaggaaggacctctagaaggcaaaatttagcctgctgacaatttcccacaccgtgtaaaccaaagccctaaaattccactgcgttgtccacaagacagaagctgaagtgcatccaaaggtgctcagagagccggcccgcctgaatcattctcgatttaactcgagaccttttcaacttggcttcctttcttggttcataaatgaattttagtttggttcacttacagatagtatctagcaatcacaacactggctgagcggatgcatctggggatgaggttgcttactaagctttgccagctgctgctggatcacagctgctttctgttgtcattgctgttgtccctctgc

SEQ ID NO: 232 - DNA, 612 bp, Homo sapiens
ggcacgagccgagccggaggctgcaggatgatgcggttcatgctattattcagccggcagggaaaactgcggctgcaaaaatggtacctggccacttcggacaaggaacggaagaagatggtgcgcgagctcatgcaggttgtcctggctcgaaagcccaagatgtgcagcttcctggagtggagggacctcaaagttgtctataagagatatgccagcctctacttctgctgcgccatcgagggccaagacaatgagctcatcacactggagctgatccaccgatacgtggagctcttagacaaatactttggcagtgtgtgcgagctggacatcatcttcaactttgagaaggcctacttcatcctggatgagtttttgatggggggggatgtccaggacacctccaagaagagtgtgctgaaagccatcgagcaggctgacctactgcaagaggaggatgagtcgccacggagtgtgctggaggagatgggtttggcatagcccctgctgggccggggtgtggcgatggggtcctggcagcgtggcgggaacggctgcttctcctctgcccagggccctgttcttggtgggactcggctgcccctcctc

SEQ ID NO: 233 - DNA, 657 bp, Homo sapiens
atgcagtttatgttgctttttagtcgtcagggaaagcttcgactgcaaaaatggtatgtcccactatcagacaaagagaagaaaaagatcacaagagaacttgttcagaccgttttagcacggaaacctaaaatgtgcagcttccttgagtggcgagatctgaagattgtttacaaaagatatgctagtctgtatttttgctgtgctattgaggatcaggacaatgaactaattaccctggaaataattcatcgttatgtggaattacttgacaagtatttcggcagtgtctgtgaactagatatcatctttaattttgagaaggcttattttattttggatgagtttcttttgggaggggaagttcaggaaacatccaagaaaaatgtccttaaagcaattgagcaggctgatctactgcaggaggaagctgaaaccccacgtagtgttcttgaagaaattggactgacataactctcctcccttgttgatgacttcttgtggcatttcacacactgtagatggtcactcccttcatgtccatgttagctcatggtgtaagatgatgtcttgtcagtattactgttttgctaagccgcttcattcatgcctacacaatttttttttaaaagggaactttagttaattaagtgataa

SEQ ID NO: 234 - DNA, 1448 bp, Homo sapiens
ccaccatgctcgccctggaggctgcacagctcgacgggccacacttcagctgtctgtacccagatggcgtcttctatgacctggacagctgcaagcattccagctaccctgattcagagggggctcctgactccctgtgggactggactgtggccccacctgtcccagccaccccctatgaagccttcgacccggcagcagccgcttttagccacccccaggctgcccagctctgctacgaaccccccacctacagccctgcagggaacctcgaactggcccccagcctggaggccccggggcctggcctccccgcataccccacggagaacttcgctagccagaccctggttcccccggcatatgccccgtaccccagccctgtgctatcagaggaggaagacttaccgttggacagccctgccctggaggtctcggacagcgagtcggatgaggccctcgtggctggccccgaggggaagggatccgaggcagggactcgcaagaagctgcgcctgtaccagttcctgctggggctactgacgcgcggggacatgcgtgagtgcgtgtggtgggtggagccaggcgccggcgtcttccagttctcctccaagcacaaggaactcctggcgcgccgctggggccagcagaaggggaaccgcaagcgcatgacctaccagaagctggcgcgcgccctccgaaactacgccaagaccggcgagatccgcaaggtcaagcgcaagctcacctaccagttcgacagcgcgctgctgcctgcagtccgccgggcctgagcacacccgaggctcccacctgcggagccgctgggggacctcacgtcccagccaggatccccctggaagaaaaagggcgtccccacactctaggtgataggacttacgcatccccaccttttggggtaaggggagtgctgccctgccataatccccaagcccagcccgggcctgtctgggattccccacttgtgcctggggtccctctgggatttctttgtcatgtacagactccctgggatcctcatgttttgggtgacaggacctatggaccactatactcggggaggcagggtagcagtgcttccagagtcccaagagcttctctgggattttcttgtgatatctgattccccagtgaggcctgggacctttttaagatcgctgtgtgtctgtaaaccctgaatctcatctggggtgggggccctgctggcaaccctgagccctgtccaaggttccctcttgtcagatctgagatttcctagttatgtctggggccctctgggagctgttatcatctcagatctcttcgcccatctatggctgtgttgtcacatctgtcccctcatttttgagatcccccaattctctggaactattctgctgcccctttttatgtgtctggagttccccaatcacatctagggctcctcc

SEQ ID NO: 235 - DNA, 2353 bp, Homo sapiens
cttacaactccgcgcggcctcggccccctgcgccgcccgccccacaacaaaactcagcgcagcgctcccgggcgcccggttcagagcgacctgcggctcagagcggaggggagactgaccggagcgcggatcgggacagcggccgggacagcggcgagacgcgcgtgtgtgagcgcgccggaccaagcgggcccagaagcgggtctgcagcccagagggcaccttctgcaaacatgtctgtggatcccctatccagcaaagctctaaagatcaagcgagagctgagcgagaacacgccgcacctgtcggacgaggcgctgatggggctgtcggtgcgcgagctgaaccggcatctgcgcgggctctccgccgaggaggtgacacggctcaagcagcggcgccgcacactcaaaaaccgtggctacgccgccagctgccgcgtgaagcgcgtgtgccagaaggaggagctgcagaagcagaagtcggagctggagcgcgaggtggacaagctggcgcgcgagaacgccgccatgcgcctggagctcgacgcgctgcgcggcaagtgcgaggcgctgcagggcttcgcgcgctccgtggccgccgcccgcgggcccgccacgctcgtggcgccggccagcgtcatcaccatcgtcaagtccaccccgggctcggggtctggccccgcccacggcccggaccccgcccacggcccggcctcctgctcctagtgcccgcccccgccatgcctcagccacgcccctccggcctcagctccctccccaaagtgcctgagcgccgcctctgtgcccaggtcccatttctctgcagcactggccccttggtgcacacacattcccttcgtgggccctgtcttcctcttgcagccccccaaactgggaccgaatgaccctgggaaggggaacttgggtaggttggggatggggcagaggtctggatctgggatcgcccttggctgaaagtttagcctttttagattgagagatacagagccggcttagagaacagctgttgggggagaagagggcacccctcatcttggaaactgctcttattgtgccaatatgccctccaaaccctcccaggattcaaagctaggtttggctgtctgtgacttacgggaccgtcctgctgagaaattgcactgaagagatgcccccacctctggttgggcctgggggtgcctggccttccgaaactaaaagagtgggtgggaagactagtgaaacccagttcacggatggggaaacaggcctgaggtcacatttcacttagtggttgtgttgggaccaaaacctgggtgtcctcactgctgccctgagtccagccatggttttcagggggacagtggacagggactcagaaatgtggtgggagggcctccctggcttgggagaccgctctctgcaagggagggggagagaagcagagggagagagaaggtgacacggatggaagagtgggaaggagctggcctggctcagccctaggctgtccctgcagccagggtgtccgggggctggccagtcagagaaagggggccatggactgctgtggcaaatagggagacaaggagacagaccctgcagtcctactacagtctggagtggggtcctaagaagaagggtcccacctcaacccctgtcagtgtccactgtggggtgggggctgacccctgcctttgattgtcattctcctgggaagcccagtctcagtccctcccccaacactgtccacactgcccctccccactgtttatttattgcacggatctaagttattctccccagccagagcccgagctcctgctccctgggaaaagtggcgtatggccctgagctgggctttatattttatatctgcaaataaatcacattttatcttatatttagggaaagccggagagcaacaacaaaaaatgtttaagccgggcgcggtggctcacatctgtaatcccagcactttgggagtccaaggagggggatcgcttgagtccaggagtttgagaccagcctggacaacatggtgaaaccccatctctacaaaaaatacaaaaattagccatgcatggtggctcatgcctgtagtcccagctacttgggaggctgaggcaggaggatcacttaagcccagaaggcagaggttgtagtgagctgagatcgcaccactgcactccagcctgggcaacatagcaaaatcctgtctcaaaaaaaaagttaaaaaatattgcccggctcctagaatttatttatttcctgacttacagcaagcgagttatcgtcttctgtattttgtagactttctaaataaagtcaaattctttctttttccacag

SEQ ID NO: 236 - DNA, 2087 bp, Homo sapiens
agtaattccgggaagctcgccttacaactccgcgcggcctcggccccctgcgccgcccgccccacaacaaaactcagcgcagcgctcccgggcgcccggttcagagcgacctgcggctcagagcggaggggagactgaccggagcgcggatcgggacagcggccgggacagcggcgagacgcgcgtgtgtgagcgcgccggaccaagcgggcccagaagcgggtctgcagcccagagggcaccttctgcaaacatgtctgtggatcccctatccagcaaagctctaaagatcaagcgagagctgagcgagaacacgccgcacctgtcggacgaggcgctgatggggctgtcggtgcgcgagctgaaccggcatctgcgcgggctctccgccgaggaggtgacacggctcaagcagcggcgccgcacactcaaaaaccgtggctacgccgccagctgccgcgtgaagcgcgtgtgccagaaggaggagctgcagaagcagaagtcggagctggagcgcgaggtggacaagctggcgcgcgagaacgccgccatgcgcctggagctcgacgcgctgcgcggcaagtgcgaggcgctgcagggcttcgcgcgctccgtggccgccgcccgcgggcccgccacgctcgtggcgccggccagcgtcatcaccatcgtcaagtccaccccgggctcggggtctggccccgcccacggcccggaccccgcccacggcccggcctcctgctcctagtgcccgcccccgccatgcctcagccacgcccctccggcctcagctccctccccaaagtgcctgagcgccgcctctgtgcccaggtcccatttctctgcagcactggccccttggtgcacacacattcccttcgtgggccctgtcttcctcttgcagccccccaaactgggaccgaatgaccctgggaaggggaacttgggtaggttggggatggggcagaggtctggatctgggatcgcccttggctgaaagtttagcctttttagattgagagatacagagccggcttagagaacagctgttgggggagaagagggcacccctcatcttggaaactgctcttattgtgccaatatgccctccaaaccctcccaggattcaaagctaggtttggctgtctgtgacttacgggaccgtcctgctgagaaattgcactgaagagatgcccccacctctggttgggcctgggggtgcctggccttccgaaactaaaagagtgggtgggaagactagtgaaacccagttcacggatggggaaacaggcctgaggtcacatttcacttagtggttgtgttgggaccaaaacctgggtgtcctcactgctgccctgagtccagccatggttttcagggggacagtggacagggactcagaaatgtggtgggagggcctccctggcttgggagaccgctctctgcaagggagggggagagaagcagagggagagagaaggtgacacggatggaagagtgggaaggagctggcctggctcagccctaggctgtccctgcagccagggtgtccgggggctggccagtcagagaaagggggccatggactgctgtggcaaatagggagacaaggagacagaccctgcagtcctactacagtctggagtggggtcctaagaagaagggtcccacctcaacccctgtcagtgtccactgtggggtgggggctgacccctgcctttgattgtcattctcctgggaagcccagtctcagtccctcccccaacactgtccacactgcccctccccactgtttatttattgcacggatctaagttattctccccagccagagcccgagctcctgctccctgggaaaagtggcgtatggccctgagctgggctttatattttatatctgcaaataaatcacattttatcttatatttagggaaagccggagagcaacaacaaaaaatgtttaagccgggcgcggtggctcacatctgtaatcccagcactttgggagtccaaggagggggatcgcttgagtccaggagtttgagaccagcctggacaacatggtgaaaccccatctctacaaaaaa

SEQ ID NO: 237 - DNA, 2639 bp, Homo sapiens
tcgaggcgaccgcgacagtggtgggggacgctgctgagtggaagagagcgcagcccggccaccggacctacttactcgccttgctgattgtctatttttgcgtttacaacttttctaagaacttttgtatacaaaggaactttttaaaaaagacgcttccaagttatatttaatccaaagaagaaggatctcggccaatttggggttttgggttttggcttcgtttcttctcttcgttgactttggggttcaggtgccccagctgcttcgggctgccgaggaccttctgggcccccacattaatgaggcagccacctggcgagtctgacatggctgtcagcgacgcgctgctcccatctttctccacgttcgcgtctggcccggcgggaagggagaagacactgcgtcaagcaggtgccccgaataaccgctggcgggaggagctctcccacatgaagcgacttcccccagtgcttcccggccgcccctatgacctggcggcggcgaccgtggccacagacctggagagcggcggagccggtgcggcttgcggcggtagcaacctggcgcccctacctcggagagagaccgaggagttcaacgatctcctggacctggactttattctctccaattcgctgacccatcctccggagtcagtggccgccaccgtgtcctcgtcagcgtcagcctcctcttcgtcgtcgccgtcgagcagcggccctgccagcgcgccctccacctgcagcttcacctatccgatccgggccgggaacgacccgggcgtggcgccgggcggcacgggcggaggcctcctctatggcagggagtccgctccccctccgacggctcccttcaacctggcggacatcaacgacgtgagcccctcgggcggcttcgtggccgagctcctgcggccagaattggacccggtgtacattccgccgcagcagccgcagccgccaggtggcgggctgatgggcaagttcgtgctgaaggcgtcgctgagcgcccctggcagcgagtacggcagcccgtcggtcatcagcgtcagcaaaggcagccctgacggcagccacccggtggtggtggcgccctacaacggcgggccgccgcgcacgtgccccaagatcaagcaggaggcggtctcttcgtgcacccacttgggcgctggaccccctctcagcaatggccaccggccggctgcacacgacttccccctggggcggcagctccccagcaggactaccccgaccctgggtcttgaggaagtgctgagcagcagggactgtcaccctgccctgccgcttcctcccggcttccatccccacccggggcccaattacccatccttcctgcccgatcagatgcagccgcaagtcccgccgctccattaccaagagctcatgccacccggttcctgcatgccagaggagcccaagccaaagaggggaagacgatcgtggccccggaaaaggaccgccacccacacttgtgattacgcgggctgcggcaaaacctacacaaagagttcccatctcaaggcacacctgcgaacccacacaggtgagaaaccttaccactgtgactgggacggctgtggatggaaattcgcccgctcagatgaactgaccaggcactaccgtaaacacacggggcaccgcccgttccagtgccaaaaatgcgaccgagcattttccaggtcggaccacctcgccttacacatgaagaggcatttttaaatcccagacagtggatatgacccacactgccagaagagaattcagtattttttacttttcacactgtcttcccgatgagggaaggagcccagccagaaagcactacaatcatggtcaagttcccaactgagtcatcttgtgagtggataatcaggaaaaatgaggaatccaaaagacaaaaatcaaagaacagatggggtctgtgactggatcttctatcattccaattctaaatccgacttgaatattcctggacttacaaaatgccaagggggtgactggaagttgtggatatcagggtataaattatatccgtgagttgggggagggaagaccagaattcccttgaattgtgtattgatgcaatataagcataaaagatcaccttgtattctctttaccttctaaaagccattattatgatgttagaagaagaggaagaaattcaggtacagaaaacatgtttaaatagcctaaatgatggtgcttggtgagtcttggttctaaaggtaccaaacaaggaagccaaagttttcaaactgctgcatactttgacaaggaaaatctatatttgtcttccgatcaacatttatgacctaagtcaggtaatatacctggtttacttctttagcatttttatgcagacagtctgttatgcactgtggtttcagatgtgcaataatttgtacaatggtttattcccaagtatgccttaagcagaacaaatgtgtttttctatatagttccttgccttaataaatatgtaatataaatttaagcaaacgtctattttgtatatttgtaaactacaaagtaaaatgaacattttgtggagtttgtattttgcatactcaaggtgagaattaagttttaaataaacctataatattttatctg

SEQ ID NO: 238 - DNA, 2079 bp, Homo sapiens
ttttccaaatcaaggtaacttgctcccttctgcctacaggccttggtcttggcttgtcctcacccagtcggaactccctaccactttcaggagagtggttttaggcccgtggggctgttctgttccaagcagtgtgagaacatggctggtagaggctctagctgtgtgcggggcctgaaggggagtgggttctcgcccaaagagcatctgcccatttcccaccttcccttctcccaccagaagcttgcctgagctgtttggacaaaaatccaaaccccacttggctactctggcctggcttcagcttggaacccaatacctaggcttacaggccatcctgagccaggggcctctggaaattctcttcctgatggtcctttaggtttgggattacacaaaatataattgcctctcccctctcccattttctctcttgggagcaatggtcacagtccctggtacctgaaaaggtacctaggtctaggcccttcttccctttcccttcctctcccctaccccagaactttggctccctttcccttctctctctggtagctccaggaggcctgtgatccagcacccacttgggcgctggaccccctctcagcaatggccaccggccggctgcacacgacttccccctggggcggcagctccccagcaggactaccccgaccctgggtcttgaggaagtgctgagcagcagggactgtcaccctgccctgccgcttcctcccggcttccatccccacccggggcccaattacccatccttcctgcccgatcagatgcagccgcaagtcccgccgctccattaccaagagctcatgccacccggttcctgcatgccaggggagcccaagccaaagaggggaagacgatcgtggccccggaaaaggaccgccacccacacttgtgattacgcgggctgcggcaaaacctacacaaagagttcccatctcaaggcacacctgcgaacccacacaggtgcgaaaccttaccactgtgactgggacggctgtggatggaaattcgcccgctcagatgaactgaccaggcactaccgtaaacacacggggcaccgcccgttccagtgccaaaaatgcgaccgagcattttccaggtcggaccacctcgccttacacatgaagaggcatttttaaatcccagacagtggatatgacccacactgccagaagagaattcagtattttttacttttcacactgtcttcccgatgagggaaggagcccagccagaaagcactacaatcatggtcaagttcccaactgagtcatcttgtgagtggataatcaggaaaaatgaggaatccaaaagacaaaaatcaaagaacagatggggtctgtgactggatcttctatcattccaattctaaatccgacttgaatattcctggacttacaaaatgccaagggggtgactggaagttgtggatatcagggtataaattatatccgtgagttgggggagggaagaccagaattcccttgaattgtgtattgatgcaatataagcataaaagatcaccttgtattctctttaccttctaaaagccattattatgatgttagaagaagaggaagaaattcaggtacagaaaacatgtttaaatagcctaaatgatggtgcttggtgagtcttggttctaaaggtaccaaacaaggaagccaaagttttcaaactgctgcatactttgacaaggaaaatctatatttgtcttccgatcaacatttatgacctaagtcaggtaatatacctggtttacttctttagcatttttatgcagacagtctgttatgcactgtggtttcagatgtgcaataatttgtacaatggtttattcccaagtatgccttaagcagaacaaatgtgtttttctatatagttccttgccttaataaatatgtaatataaatttaagcaaacgtctattttgtatatttgtaaactacaaagtaaaatgaacattttgtggagtttgtattttgcatactcaaggtgagaattaagttttaaataaacctataatattttatctgaaaaaaaaaaaaaaaaaaa

SEQ ID NO: 239 - DNA, 3101 bp, Homo sapiens
gccgccgccatccgccgccgcagccagcttccgccgccgcaggaccggcccctgccccagcctcgcagccgcggcgtccacgcccgcccgcgcccagggcgagtcggggtcgccgcctgcacgcttctcagtgttccccgcgccccgcatgtaacccggccaggcccccgcaactgtgtcccctgcagctccagccccgggctgcacccccccgccccgacaccagctctccagcctgctcgtccaggatggccgcggccaaggccgagatgcagctgatgtccccgctgcagatctctgacccgttcggatcctttcctcactcgcccaccatggacaactaccctaagctggaggagatgatgctgctgagcaacggggctccccagttcctcggcgccgccggggccccagagggcagcggcagcaacagcagcagcagcagcagcgggggcggtggaggcggcgggggcggcagcaacagcagcagcagcagcagcaccttcaaccctcaggcggacacgggcgagcagccctacgagcacctgaccgcagagtcttttcctgacatctctctgaacaacgagaaggtgctggtggagaccagttaccccagccaaaccactcgactgccccccatcacctatactggccgcttttccctggagcctgcacccaacagtggcaacaccttgtggcccgagcccctcttcagcttggtcagtggcctagtgagcatgaccaacccaccggcctcctcgtcctcagcaccatctccagcggcctcctccgcctccgcctcccagagcccacccctgagctgcgcagtgccatccaacgacagcagtcccatttactcagcggcacccaccttccccacgccgaacactgacattttccctgagccacaaagccaggccttcccgggctcggcagggacagcgctccagtacccgcctcctgcctaccctgccgccaagggtggcttccaggttcccatgatccccgactacctgtttccacagcagcagggggatctgggcctgggcaccccagaccagaagcccttccagggcctggagagccgcacccagcagccttcgctaacccctctgtctactattaaggcctttgccactcagtcgggctcccaggacctgaaggccctcaataccagctaccagtcccagctcatcaaacccagccgcatgcgcaagtaccccaaccggcccagcaagacgcccccccacgaacgcccttacgcttgcccagtggagtcctgtgatcgccgcttctcccgctccgacgagctcacccgccacatccgcatccacacaggccagaagcccttccagtgccgcatctgcatgcgcaacttcagccgcagcgaccacctcaccacccacatccgcacccacacaggcgaaaagcccttcgcctgcgacatctgtggaagaaagtttgccaggagcgatgaacgcaagaggcataccaagatccacttgcggcagaaggacaagaaagcagacaaaagtgttgtggcctcttcggccacctcctctctctcttcctacccgtccccggttgctacctcttacccgtccccggttactacctcttatccatccccggccaccacctcatacccatcccctgtgcccacctccttctcctctcccggctcctcgacctacccatcccctgtgcacagtggcttcccctccccgtcggtggccaccacgtactcctctgttccccctgctttcccggcccaggtcagcagcttcccttcctcagctgtcaccaactccttcagcgcctccacagggctttcggacatgacagcaaccttttctcccaggacaattgaaatttgctaaagggaaaggggaaagaaagggaaaagggagaaaaagaaacacaagagacttaaaggacaggaggaggagatggccataggagaggagggttcctcttaggtcagatggaggttctcagagccaagtcctccctctctactggagtggaaggtctattggccaacaatcctttctgcccacttccccttccccaattactattccctttgacttcagctgcctgaaacagccatgtccaagttcttcacctctatccaaagaacttgatttgcatggattttggataaatcatttcagtatcatctccatcatatgcctgaccccttgctcccttcaatgctagaaaatcgagttggcaaaatggggtttgggcccctcagagccctgccctgcacccttgtacagtgtctgtgccatggatttcgtttttcttggggtactcttgatgtgaagataatttgcatattctattgtattatttggagttaggtcctcacttgggggaaaaaaaaaaaagaaaagccaagcaaaccaatggtgatcctctattttgtgatgatgctgtgacaataagtttgaacctttttttttgaaacagcagtcccagtattctcagagcatgtgtcagagtgttgttccgttaacctttttgtaaatactgcttgaccgtactctcacatgtggcaaaatatggtttggtttttctttttttttttttttgaaagtgttttttcttcgtccttttggtttaaaaagtttcacgtcttggtgccttttgtgtgatgcgccttgctgatggcttgacatgtgcaattgtgagggacatgctcacctctagccttaaggggggcagggagtgatgatttgggggaggctttgggagcaaaataaggaagagggctgagctgagcttcggttctccagaatgtaagaaaacaaaatctaaaacaaaatctgaactctcaaaagtctatttttttaactgaaaatgtaaatttataaatatattcaggagttggaatgttgtagttacctactgagtaggcggcgatttttgtatgttatgaacatgcagttcattattttgtggttctattttactttgtacttgtgtttgcttaaacaaagtgactgtttggcttataaacacattgaatgcgctttattgcccatgggatatgtggtgtatatccttccaaaaaattaaaacgaaaataaagt

SEQ ID NO: 240 - DNA, 1837 bp, Homo sapiens
gagccgcgcacgggactgggaaggggacccacccgagggtccagccaccagccccctcactaatagcggccaccccggcagcggcggcagcagcagcagcgacgcagcggcgacagctcagagcagggaggccgcgccacctgcgggccggccggagcgggcagccccaggccccctccccgggcacccgcgttcatgcaacgcctggtggcctgggacccagcatgtctccccctgccgccgccgccgcctgcctttaaatccatggaagtggccaacttctactacgaggcggactgcttggctgctgcgtacggcggcaaggcggcccccgcggcgccccccgcggccagacccgggccgcgcccccccgccggcgagctgggcagcatcggcgaccacgagcgcgccatcgacttcagcccgtacctggagccgctgggcgcgccgcaggccccggcgcccgccacggccacggacaccttcgaggcggctccgcccgcgcccgcccccgcgcccgcctcctccgggcagcaccacgacttcctctccgacctcttctccgacgactacgggggcaagaactgcaagaagccggccgagtacggctacgtgagcctggggcgcctgggggccgccaagggcgcgctgcaccccggctgcttcgcgcccctgcacccaccgcccccgccgccgccgccgcccgccgagctcaaggcggagccgggcttcgagcccgcggactgcaagcggaaggaggaggccggggcgccgggcggcggcgcaggcatggcggcgggcttcccgtacgcgctgcgcgcttacctcggctaccaggcggtgccgagcggcagcagcgggagcctctccacgtcctcctcgtccagcccgcccggcacgccgagccccgctgacgccaaggcgcccccgaccgcctgctacgcgggggccgcgccggcgccctcgcaggtcaagagcaaggccaagaagaccgtggacaagcacagcgacgagtacaagatccggcgcgagcgcaacaacatcgccgtgcgcaagagccgcgacaaggccaagatgcgcaacctggagacgcagcacaaggtcctggagctcacggccgagaacgagcggctgcagaagaaggtggagcagctgtcgcgcgagctcagcaccctgcggaacttgttcaagcagctgcccgagcccctgctcgcctcctccggccactgctagcgcggcccccgcgcgcgtccccctgccggccggggctgagactccggggagcgcccgcgcccgcgccctcgcccccgcccccggcggcgccggcaaaactttggcactggggcacttggcagcgcggggagcccgtcggtaattttaatattttattatatatatatatctatatttttgtccaaaccaaccgcacatgcagatggggctcccgcccgtggtgttatttaaagaagaaacgtctatgtgtacagatgaatgataaactctctgcttctccctctgcccctctccaggcgccggcgggcgggccggtttcgaagttgatgcaatcggtttaaacatggctgaacgcgtgtgtacacgggactgacgcaacccacgtgtaactgtcagccgggccctgagtaatcgcttaaagatgttcctacgggcttgttgctgttgatgttttgttttgttttgttttttggtctttttttgtattataaaaaataatctatttctatgagaaaagaggcgtctgtatattttgggaatcttttccgtttcaagcattaagaacacttttaataaacttttttttgagaatggttacaaagcc

SEQ ID NO: 241 - DNA, 1837 bp, Homo sapiens; identical to SEQ ID NO: 240

SEQ ID NO: 242 - DNA, 1720 bp, Homo sapiens
cctaaaagccaaaatgggaaaggaaaagactcatatcaacattgtcgtcattggacacgtagattcgggcaagtccaccactactggccatctgatctataaatgcggtggcatcgacaaaagaaccattgaaaaatttgagaaggaggctgctgagatgggaaagggctccttcaagtatgcctgggtcttggataaactgaaagctgagcgtgaacgtggtatcaccattgatatctccttgtggaaatttgagaccagcaagtactatgtgactatcattgatgccccaggacacagagactttatcaaaaacatgattacagggacatctcaggctgactgtgctgtcctgattgttgctgctggtgttggtgaatttgaagctggtatctccaagaatgggcagacccgagagcatgcccttctggcttacacactgggtgtgaaacaactaattgtcggtgttaacaaaatggattccactgagccaccctacagccagaagagatatgaggaaattgttaaggaagtcagcacttacattaagaaaattggctacaaccccgacacagtagcatttgtgccaatttctggttggaatggtgacaacatgctggagccaagtgctaacatgccttggttcaagggatggaaagtcacccgtaaggatggcaatgccagtggaaccacgctgcttgaggctctggactgcatcctaccaccaactcgtccaactgacaagcccttgcgcctgcctctccaggatgtctacaaaattggtggtattggtactgttcctgttggccgagtggagactggtgttctcaaacccggtatggtggtcacctttgctccagtcaacgttacaacggaagtaaaatctgtcgaaatgcaccatgaagctttgagtgaagctcttcctggggacaatgtgggcttcaatgtcaagaatgtgtctgtcaaggatgttcgtcgtggcaacgttgctggtgacagcaaaaatgacccaccaatggaagcagctggcttcactgctcaggtgattatcctgaaccatccaggccaaataagcgccggctatgcccctgtattggattgccacacggctcacattgcatgcaagtttgctgagctgaaggaaaagattgatcgccgttctggtaaaaagctggaagatggccctaaattcttgaagtctggtgatgctgccattgttgatatggttcctggcaagcccatgtgtgttgagagcttctcagactatccacctttgggtcgctttgctgttcgtgatatgagacagacagttgcggtgggtgtcatcaaagcagtggacaagaaggctgctggagctggcaaggtcaccaagtctgcccagaaagctcagaaggctaaatgaatattatccctaatacctgccaccccactcttaatcagtggtggaagaacggtctcagaactgtttgtttcaattggccatttaagtttagtagtaaaagactggttaatgataacaatgcatcgtaaaaccttcagaaggaaaggagaatgttttgtggaccactttggttttcttttttgcgtgtggcagttttaagttattagtttttaaaatcagtactttttaatggaaacaacttgaccaaaaatttgtcacagaattttgagacccattaaaaaagttaaatgagaaaaaaaaaaaaaaaaaaaaaaaaaa

SEQ ID NO: 243 - DNA, 1747 bp, Homo sapiens
gaatcactgcagcccccctcgccctgagccagagcaccccgggtcccgccagcccctcacactcccagcaaaatgggcaaggagaagacccacatcaacatcgtggtcatcggccacgtggactccggaaagtccaccaccacgggccacctcatctacaaatgcggaggtattgacaaaaggaccattgagaagttcgagaaggaggcggctgagatggggaagggatccttcaagtatgcctgggtgctggacaagctgaaggcggagcgtgagcgcggcatcaccatcgacatctccctctggaagttcgagaccaccaagtactacatcaccatcatcgatgcccccggccaccgcgacttcatcaagaacatgatcacgggtacatcccaggcggactgcgcagtgctgatcgtggcggcgggcgtgggcgagttcgaggcgggcatctccaagaatgggcagacgcgggagcatgccctgctggcctacacgctgggtgtgaagcagctcatcgtgggcgtgaacaaaatggactccacagagccggcctacagcgagaagcgctacgacgagatcgtcaaggaagtcagcgcctacatcaagaagatcggctacaacccggccaccgtgccctttgtgcccatctccggctggcacggtgacaacatgctggagccctcccccaacatgccgtggttcaagggctggaaggtggagcgtaaggagggcaacgcaagcggcgtgtccctgctggaggccctggacaccatcctgccccccacgcgccccacggacaagcccctgcgcctgccgctgcaggacgtgtacaagattggcggcattggcacggtgcccgtgggccgggtggagaccggcatcctgcggccgggcatggtggtgacctttgcgccagtgaacatcaccactgaggtgaagtcagtggagatgcaccacgaggctctgagcgaagctctgcccggcgacaacgtcggcttcaatgtgaagaacgtgtcggtgaaggacatccggcggggcaacgtgtgtggggacagcaagtctgacccgccgcaggaggctgctcagttcacctcccaggtcatcatcctgaaccacccggggcagattagcgccggctactccccggtcatcgactgccacacagcccacatcgcctgcaagtttgcggagctgaaggagaagattgaccggcgctctggcaagaagctggaggacaaccccaagtccctgaagtctggagacgcggccatcgtggagatggtgccgggaaagcccatgtgtgtggagagcttctcccagtacccgcctctcggccgcttcgccgtgcgcgacatgaggcagacggtggccgtaggcgtcatcaagaacgtggagaagaagagcggcggcgccggcaaggtcaccaagtcggcgcagaaggcgcagaaggcgggcaagtgaagcgcgggcgcccgcggcgcgaccctccccggcggtgccgcgctccgaaccccgggcccgggcccccgccccgcccccgccccgcgcgccggtccggcgccccgcacccccgccaggcgcatgtctgcacctccgcttgccagaggccctcggtcagcgactggatgctcgccatcaaggtccagtggaagttcttcaagaggaaaggcgcccccgccccaggcttccgcgcccagcgctcgccacgctcagtgcccgttttaccaataaactgagcgacccc

SEQ ID NO: 244 - DNA, 3148 bp, Homo sapiens
cgccgccatcctcggcgcgactcgcttctttcggttctacctgggagaatccaccgccatccgccaccatggtgaacttcacggtagaccagatccgcgccatcatggacaagaaggccaacatccgcaacatgtctgtcatcgcccacgtggaccatggcaagtccacgctgacagactccctggtgtgcaaggcgggcatcatcgcctcggcccgggccggggagacacgcttcactgatacccggaaggacgagcaggagcgttgcatcaccatcaagtcaactgccatctccctcttctacgagctctcggagaatgacttgaacttcatcaagcagagcaaggacggtgccggcttcctcatcaacctcattgactcccccgggcatgtcgacttctcctcggaggtgactgctgccctccgagtcaccgatggcgcattggtggtggtggactgcgtgtcaggcgtgtgcgtgcagacggagacagtgctgcggcaggccattgccgagcgcatcaagcctgtgctgatgatgaacaagatggaccgcgccctgctggagctgcagctggagcccgaggagctctaccagactttccagcgcatcgtggagaacgtgaacgtcatcatctccacctacggcgagggcgagagcggccccatgggcaacatcatgatcgatcctgtcctcggtaccgtgggctttgggtctggcctccacgggtgggccttcaccctgaagcagtttgccgagatgtatgtggccaagttcgccgccaagggggagggccagttggggcctgccgagcgggccaagaaagtagaggacatgatgaagaagctgtggggtgacaggtactttgacccagccaacggcaagttcagcaagtcagccaccagccccgaagggaagaagctgccacgcaccttctgccagctgatcctggaccccatcttcaaggtgtttgatgcgatcatgaatttcaagaaagaggagacagcaaaactgatagagaaactggacatcaaactggacagcgaggacaaggacaaagaaggcaaacccctgctgaaggctgtgatgcgccgctggctgcctgccggagacgccttgttgcagatgatcaccatccacctgccctcccctgtgacggcccagaagtaccgctgcgagctcctgtacgaggggcccccggacgacgaggctgccatgggcattaaaagctgtgaccccaaaggccctcttatgatgtatatttccaaaatggtgccaacctccgacaaaggtcggttctacgcctttggacgagtcttctcggggctggtctccactggcctgaaggtcaggatcatggggcccaactatacccctgggaagaaggaggacctctacctgaagccaatccagagaacaatcttgatgatgggccgctacgtggagcccatcgaggatgtgccttgtgggaacattgtgggcctcgtgggcgtggaccagttcctggtgaagacgggcaccatcaccaccttcgagcacgcgcacaacatgcgggtgatgaagttcagcgtcagccctgttgtcagagtggccgtggaggccaagaacccggctgacctgcccaagctggtggaggggctgaagcggctggccaagtccgaccccatggtgcagtgcatcatcgaggagtcgggagagcacatcatcgcgggcgccggcgagctgcacctggagatctgcctgaaggacctggaggaggaccacgcctgcatccccatcaagaaatctgacccggtcgtctcgtaccgcgagacggtcagtgaagagtcgaacgtgctctgcctctccaagtcccccaacaagcacaaccggctgtacatgaaggcgcggcccttccccgacggcctggccgaggacatcgataaaggcgaggtgtccgcccgtcaggagctcaagcagcgggcgcgctacctggccgagaagtacgagtgggacgtggctgaggcccgcaagatctggtgctttgggcccgacggcaccggccccaacatcctcaccgacatcaccaagggtgtgcagtacctcaacgagatcaaggacagtgtggtggccggcttccagtgggccaccaaggagggcgcactgtgtgaggagaacatgcggggtgtgcgcttcgacgtccacgacgtcaccctgcacgccgacgccatccaccgcggagggggccagatcatccccacagcacggcgctgcctctacgccagtgtgctgaccgcccagccacgcctcatggagcccatctaccttgtggagatccagtgtccagagcaggtggtcggtggcatctacggggttttgaacaggaagcggggccacgtgttcgaggagtcccaggtggccggcacccccatgtttgtggtcaaggcctatctgcccgtcaacgagtcctttggcttcaccgctgacctgaggtccaacacgggcggccaggcgttcccccagtgtgtgtttgaccactggcagatcctgcccggagaccccttcgacaacagcagccgccccagccaggtggtggcggagacccgcaagcgcaagggcctgaaagaaggcatccctgccctggacaacttcctggacaaattgtaggcggcccttcctgcagcgcctgccgccccggggactcgcagcacccacagcaccacgtcctcgaattctcagacgacacctggagactgtcccgacacagcgacgctcccctgagaggtttctggggcccgctgcgtgccatcactcaaccataacacttgatgccgtttctttcaatatttatttccagagtccggaggcagcagacacgccctcttagtagggacttaatgggccggtcggggagggggaggcgggatgggacacccaacactttttccatttcttcagagggaaactcagatgtccaaactaattttaacaaacgcattaagaggtttatttgggtacatggcccgcagtggcttttgccccagaaaggggaaaggaacacgcgggtagatgatttctagcaggcaggaagtcctgtgcggtgtcaccatgagcacctccagctgtactagtgccattggaataataaatttgataaggtggtgaaaaaa

SEQ ID NO: 245 - DNA, 6007 bp, Homo sapiens
cgaggaggagccaagatggccgaataggaacagctccggtctacagctcccagcgtgagcgacgcagaagacgggtgatttctgcatttccatctgaggtaccgggttcatctcactagggagtgccagacagtgggcgcaggccagtgtgtgtgcgcactgtgcgcgagccgaagcagggcgaggcattgcctcacttgggaagcgcaaggggtcagggagttccctttccgagtcaaagaaaggggtgacggacgcacctggaaaatcgggtcactcccacccgaatattgcgcttttcagaccggcttaaaaaacggcgcaccacgagactatatcccacacctggctcagagggtcctacgcccacggaatctcgctgattgctagcacagcagtctgagatcaaactgcaaggcggcaacgaggctgggggaggggcgcccgccattgcccaggcttgcttaggtaaacaaagcagccgggaagctcgaactgggtggagcccaccacagctcaaggaggcctgcctgcctctgtaggctccacctctgggggcagggcacagacaaacaaaaaggcagcagtaacctctgcagacttaagtgtccctgtctgacagctttgaagagagcagtggttctcccagcacgcagctggagatctgagaacgggcagactgcctcctcaagtgggtccctgacccctgacccccgagcagcctaactgggaggcaccccccagcagggtcacacggcagggtattccaacagacctgcagctgagggtcctgtctgttagaaggaaaactaacaaccagaaaggacatccacaccaaaaacccatctgtacatcaccatcatcaaagaccaaaagtagataaaaccacaaagatggggaaaaaacagaacagaaaaactggaaactctaaaacgcagagcgcctctcctcctccaaaggaacgcagttcctcaccagcaacagaacaaagctggatggagaatgattttgacgagctgagagaagaaggcttcagacgatcaaattactctgagctacgggaggacattcaaaccaaaggcaaagaagttgaaaactttgaaaaaaatttagaagaatgtataactagaatatccaatacagagaagtgcttaaaggagctgatggagctgaaaaccaaggctcgagaactacgtgaagaatgcagaagcctcaggagccgatgcgatcaactggaagaaagggtatcagcaatggaagatgaaatgaatgaaatgaagcgagaagggaagtttagagaaaaaagaataaaaagaaatgagcaaagcctccaagaaatatgggactatgtgaaaaggccaaatctacgtctgattggtgtacctgaaagtgatgtggagaatggaaccaagttggaaaacactctgcaggatattatccaggagaacttccccaatctagcaaggcaggccaacgttcagattcaggaaatacagagaacgccacaaagatactcctcgagaagagcaactccaagacacataattgtcagattcaccaaagttgaaatgaaggaaaaaatgttaagggcagccagagagaaaggtcgggttaccctcaaagggaagcccatcagactaacagcggatctctcggcagaaaccctacaagccagaagagagtgggggccaatattcaacattcttaaagaaaagaattttcaacccagaatttcatatccagccaaactaagcttcataagtgaaggagaaataaaatcctttacagacaggcaaatgctgagagattttgtcaccaccaggcctgccctaaaagagctcctgaaggaagcgctaaacatggaaaggaacaaccggtaccagccgctgcaaaatcatgccaaaatgtaaagaccatcgagactaggaagaaactgcatcaactaacgagcaaaatcaccagctaacatcataatgacaggatcaaattcacacataacaatattaactttaaatgtaaatggactaaattctccaattaaaagacacagactggcaagttggataaagagtcaagacccatcagtgtgctgtattcaggaaacccatctcacgtgcagagacacacataggctcaaaataaaaggatggaggaagatctaccaagcaaatggaaaacaaaaaaaggcaggggttgcaatcctagtctctgataaaacagactttaaaccaacaaagatcaaaagagacaaagaaggccattacataatggtaaagggatcaattcaacaagaggagctaactatcctaaatatttatgcacccaatacaggagcacccagattcataaagcaagtcctgagtgacctacaaagagacttagactcccacacattaataatgggagactttaacaccccactgtcaatattagacagatcaacgagacagaaagtcaacaaggatacccaggaattgaactcagctctgcaccaaacagacctaatagacatctacagaactctccaccccaaatcaacagaatatacatttttttcagcaccacaccacacctattccaaaattgaccacatagttggaagtaaagctctcctcagcaaatgtaaaagaacagaaattataacaaactatctctcagaccacagtgcaatcaaactagaactcaggattaagaatctcactcaaagccgctcaactacatggaaactgaacaacctgctcctgaatgactactgggtacataacgaaatgaaggcagaaataaagatgttctttgaaaccaacgagaacaaagacacaacataccagaatctctgggacgcattcaaagcagtgtgtagagggaaatttatagcactaaatgcctacaagagaaagcaggaaagatccaaaattgacaccctaacatcacaattaaaagaactagaaaagcaagagcaaacacattcaaaagctagcagaaggcaagaaataactaaaatcagagcagaactgaaggaaatagagacacaaaaaacccttcaaaaaatcaatgaatctaggagctggttttttgaaaggatcaacaaaattgatagaccgctagcaagactaataaagaaaaaaagagagaagaatcaaatagacacaataaaaaatgataaaggggatatcaccaccgatcccacagaaatacaaactaccatcagagaatactacaaacacctctacgcaaataaactagaaaatctagaagaaatggatacattcctcgacacatacactctcccaagactaaaccaggaagaagttgaatctctgaatagaccaataacaggctctgaaattgtggcaataatcaatagtttaccaaccaaaaagagtccaggaccagatggattcacagccgaattctaccagaggtacaaggaggaactggtaccattccttctgaaactattccaatcaatagaaaaagagggaatcctccctaactcattttatgaggccagcatcattctgataccaaagccgggcagagacacaaccaaaaaagagaattttagaccaatatccttgatgaacattgatgcaaaaatcctcaataaaatactggcaaaccgaatccagcagcacatcaaaaagcttatccaccatgatcaagtgggcttcatccctgggatgcaaggctggttcaatatacgcaaatcaataaatgtaatccagcatataaacagagccaaagacaaaaaccacgtgattatctcaatagatgcagaaaaagcctttgacaaaattcaacaacccttcatgctaaaaactctcaataaattaggtattgatgggatgtatctcaaaataataagagctatctatgacaaacccacagccaatatcatactgaatgggcaaaaactggaagcattccctttgaaaactggcacaagacagggatgccctctctcaccactcctattcaacatagtgttggaagttctggccagggcaatcaggcaggagaaggaaataaagggtattcaattaggaaaagaggaagtcaaattgtccctgtttgcagacgacatgattgtttatctagaaaaccccatcgtctcagcccaaaatctccttaagctgataagcaacttcagcaaagtctcaggatacaaaatcaatgtacaaaaatcacaagcattcttatacaacaacaacagacaaacagagagccaaatcatgggtgaactcccattcacaattgcttcaaagagaataaaatacctaggaatccaacttacaagggatgtgaaggacctcttcaaggagaactacaaaccactgctcaaggaaataaaagaggacacaaacaaatggaagaacattccatgctcatgggtaggaagaatcaatatcgtgaaaatggccatactgcccaaggtaatttacagattcaatgccatccccatcaagctaccaatgactttcttcacagaattggaaaaaactactttaaagttcatatggaaccaaaaaagagcccgcattgccaagtcaatcctaagccaaaagaacaaagctggaggcatcacactacctgacttcaaactatactacaaggcgacagtaaccaaaacagcatggtactggtaccaaaacagagatatagatcaatggaacagaacagagccctcagaaataatgccacatatctacaactatctgatctttgacaaacctgagaaaaacaagcaatggggaaaggattccctattgaataaatggtgctgggaaaactggctagccatatgtagaaagctgaaactcgatcccttccttacaccttatacaaaaatcaattcaagatggattaaagatttaaacgttaaacctaaaaccataaaaaccctagaagaaaacctaggcattaccattcaggacataggcgtgggcaaggacttcatgtccaaaacaccaaaagcaatggcaacaaaagacaaaattgacaaatgggatctaattaaactaaagagcttctgcacagcaaaagaaactaccatcagagtgaacaggcaacctacaacatgggagaaaattttcgcaacctactcatctgacaaagggctaatatccagaatctacaatgaactcaaacaaatttacaagaaaaaaacaaacaaccccatcaaaaagtgggcgaaggacatgaacagacacttctcaaaagaagacatttatgcagccaaaaaacacatgaagaaatgctcatcatcactggccatcagagaaatgcaaatcaaaaccactatgagatatcatctcacaccagttagaatggcaatcattaaaaagtcaggaaacaacaggtgctggagaggatgcggagaaataggaacacttgtacactgttggtgggactgtaaactagttcaaccattgtggaagtcagtgtggcgattcctcagggatctagaactagaaataccatttgacccagccatcccattactgggtatatacccaaaggactataaatcatgctgctataaagacacatgcacacgtatgtttattgcggcactattcacaatagcaaagacttggaaccaacccaactgtccaacaatgatagactggattaagaaaatgtggcacatatacaccatggaatactatgcagccataaaaaatgatgagttcatatcctttgtagggacatggatgaaattggaaaccatcattctcagtaaactatcgcaagaacaaaaaaccaaacaccgcatattctcactcataggtgggaattgaacaatgagatcacatggacacaggaaggggaatatcacactctggggactgtggtggggtcgggggaggggggagggatagcattgggagatatacctaatgctagatgacacattagtgggtgcagcgcaccagcatggcacatgtatacatatgtaactagcctgcacaatgtgcacatgtaccctaaaacttagagtataata

SEQ ID NO: 246 - DNA, 201239 bp, Homo sapiens
tccttgtcccaggtgaaatcccagctcaggtgttatatccttgctgcttctgacaaatgaaaccaaggtgtattaattaaggtaatgctagctactacaataagctgaaaaatatataatagctaaaagctagggtgccagatttaggaaaataaaaacaaacaaaaaacaattgaaatttgaatttcagataaacaatttttttagtataattatgtcccatgcaatatttgagacatactaaaaggttattcattgtttatctgatattcaaatttaacattttcattaatttattttatttggcagccctatggaagacatcaaaagtttatttcttatttatataaagtccaaaatagatgttttttagtaggcaggcagctcttctctaagcgtaattcagggctctgggttctgtccatcctggccctgacgtctttcattgctcagcttctaagatagctctatgctcatggggtcaagtcacaggaaagaaaagggaatgtggagttccacttgggagtttttatgggccagtcctggaagcggcacagaggatttctgctcacaatctattggccagaactcaatcacatggcctgcacctaactgcaagttaagccagaaaaatgtaggtgtgcccaggaagaagtttggggaacagctagccagtctctgccacacctggtaacagcagagtgaatctgtcagtactcgtgcctaatgcgtgtctcatatgctagtgctggattcagtcagcagtcctacatccgctggggtccctaggaggggtcagatgctctcctctttgccctgaactggttagctacttcggactgggatgacaaggccattgtgagagtgataagcaatgtgattcaaacaaattcatttcacttcaattcaatgcaggtttttttttttttttgagacgggctgtcatgctgttgccaaccctggagagcagtggcgccattacggctcactgcagcctcctgggctcaagcaattctccctcctcagcttcccaagtagctgggactacaggtgcatgccaccatgttcagctcatttattttttatttttttgtagacaggaggtctcactatgttacccaggctgctgtccaagtcctgggctcacgtgattctcccgcctcagcctcccaaaatgctgggattacaggcgtaagccaccatgcccagacaatttaataaatatttattaaaacttctaggatattgagaaaagcttggttctaggccactggggaagacatcaactgaaacagcccagttatactctcaattagctgtatacaattaaattcacagatatcctcaacccttatccatatcccattcatctttcaaaggttggtgaaaacctcatagcacaaagaattctgccctaaatgtttgaatacagaatggtcccctctctccctaattcctaaaatatttggtctctatgttcattcattcattcatgcatgcatgctttcagttagttcatcgacaaacatttacatctactctgtttgacagtgtgctaggctctggggcttgggagtggaaatactaaattgaacaagactgaggccttgccttccagaaactcacaaaggagtgggtggtcagaatgcacatgactcagtcagatataaggcagatggtggtaaatactatgataaatgttcagatagtgctaaggggcttatggagaatgggagaaattaaatctgactcaagggtgggtggagaagattacatccaagatccagcaatgacttccagaagagacaaatgaacctggcctggcaagggaggcagagtcaaagtgtctggctcaaagcccaccacagccttggctcacaggcatctcccggtcttccactcactcagtcctttcagggaaaggcactgagcttttctcaagggagaactccaaagacgtctttcatttcatcttacaaatccacacaaatttgcaattccactccacaagatacgagcatttgtcttgctataattttaatatgattggcataaattacctgttatcaagtaaaatagtttcttcttatggcttgtgtgcccctgacataccactgctatttgaaaagaggcttctccagaaactcagtgtctgagagtacgtgactggaaggtgagtgtttgcttaccccttgcgttttctccctgtcaggataaatggaatattctgctttaaggaccctaagtctggcaatatcatgttttgtgaacagccaacacagtaactatggttgaggcctgtattcgatgaatgaggttttcatatgcttctttcacatcaggagagagagagagaaaaaaaaataataaacttggtagaggacgtggagttgtatttctggactatggtggcacctctaaggagcatggttttccttttgcatggctttgtccattactataacactcctgttataaaatagctgccgtggattgaaatccataatgttaactcaaaagttaagcagtccgctattaaacagcataagaaactgttacctatcccctcttcctggccccccaacaaagaaacagcaaactgttaaaaaagcccatgtctccccatgaggacttggggttaattttcagcatggtgtctggggattcatctgtgggactcctattacccataataggactcatgctgcttcatttcatgcacacgatatggaaaatgcacccttccctagtgatgaaattttagttttgaaattgaggctagcttttgcagaacaaagcagattcccagaaacaccaaaaactattcaatgttggcctagagcctgtgtgtccgtgcttaggtgagtatgtgtatctgaaagggagaaaatgccttcctctaagtgcgtatgcccctctcaaagacaatattcaaatatcatgcccgatagctgacagcggtcaatggttgctatgcttcatcccaaagctttgttaggaaccccataaaacctggcacatggtttgtgacacccagtgaaacaccgtgcttcttccataatatcctgagccctgctgcctgtcattaagggacctctcttattaagcatctcttttttaaatggctgccatcatctggtcccagtgtacattaaatcccattataattataaacacacttccccataacattcgttgcagatctcaccctcagtgcctacccccttagggcatctttgcactaataacaactcagatttgctatctgagttgacaacattaggtcccaacaccatttgcaatatgctggggaaagagacagagagagaagaaaaagctttttcttccttaatcacgaagatcttggggtcacagtgacccaaggcctcaggagctaaaaaaaaaaaatccctcctcctacccttttgaaaagtcactctctactctacagatgagggaagggcatacttggcacctgggagagaaactcaagtttgtaaacaccactaaccaggtctctgttggttggggcggtgatggtggtggtagtggtggggtgggggatgagggatgatggcaatcactaatcaaagaagctgtcttatttggtttgctgagcctcaactaaccggaatgcatacatcacctgattctttccccctctgctttttggagggggcatctaaggacataatgtaaaagaattaaaatttaaaaacaaaaacaaaatgtcaacatatgcaggagtaaattccactctgcctaatttttttttttttttgaaatgagatcttgttctgtcacccaggctggagggcagtggtgcaatctcagctcactgcagccaccacctcccaggttcaagcgattctcccgcctcagccccctaagtagctggtattacaggcacgtgccaccacgcctggctaatttttgtatttttagtagagatagggtttcaccatgttggccaggctggtctcaaactcctgacctcaagtgatccgcctgcctcggcctcctaaagtgctgggagtacaggcatgagccactgcgcccagcctactctgcccaattgttgacatcacctacagctctatagtagatgtctggaatgatgatctgaaggactgtaagactgtaagattttttgactccagaaatggacacaataggcttgcggtgtcttcccctaacagtccctggcagggtaaaggtctgatgccctggtacgttccccagtggcaatctggagttctcaactgcagagaatacttttcctctactcaggggcgtcactacctgcatctctccctgaacatgcttcattttccactcatcacaagtttttggggaaatgcaaagtggcatcttctccccaaaaggtagggatctttgatttttttaatcacgatagaaaagtttactttgaaataaaaaaattaaatatatgttccaaattaagagttggaacttaaagagttgcaacattccattcatactcagatactcaaaacaccactgtattcttcttcctatctctttagttgaagtttttttttgtaattcaaagccccctccccaatttctgcctgagattctgagggaggaggaaaagtgtaagatcctgggggatctaagtctctttacctggtgaccaagctgagaaccatttggtcctcagcttggctggctgctgcacagatcttggcctcagcagagtaagagaagaaggaaaattaaaagcccttgcttccttcatctatttcactagaggctacataatctagaagttaagagcatgagctttgcagtcagaatggtctgatttaaagtttcagctctgatgtttaatagatctacagtctgcagtaaggcacttaatctctctgaacctcagttttcatgtccacagaaattgggaaaataatagcacctgcattaataggattgttatgtggattaaataaaacaacataggtaatgtgttgagtttcgtagtcagtgctcagaatgagttattattttcgctgtctccttcctgtatgatctcttagaactgctataccctcctgttccactaactgagctctgaaaggctgccagtggtgggaggtacatgggtaaagagggagatgagggagtaagatttagcaatggaattccatgcaaaggccagctcatctattcctctgtctctagcatgatctccccctaagattgagatctcctgtatttttagaactgatacccaggtttcccttaaaagacgcttcaagaaaaaatgtaaaagaaaaatcactctaaatacacgaacatgagagagacagaaagagagcgggcatgtgcgcgcgagagagattgagtattctcttgtaattttccatcctgcttgtttttaggtgctgccatatgaaatctctgaactgaggagtctcatcagccttcccaggacccaaggacatagctctggctataaatggtgccagttttggtgggggagctgctgctgctttatctgggcccaataaaccttatcaaactgctgtgcagccagccttcagcgctaagtggaaatgcttggagcccaatgctggcattcagcccacagcctcgcctgccttcttcctttttgttaccttctccacctcttaaattcaggcattaatctctctttaacacttactaacaagggctgggcttttaatgggcagcgtttatgaagcaagggagattttcacatagagtgaatatggcacgggggtggggaggccagggccatagaggattgtgctttctctcccattgtttccagagattctctctttctctgatttgaggattaataggagattaggatcaggggttaattgtgtgcttctcctgctactgcactgaggagaggctggtaggtggatgtggacagcaaagcggaaacctacagcaggcactatctaggcagaagctcaacaagtgtagtgattctttcttctgtttccctggtgaggcaccaggagggtcttttctcctctccttacatccctccactcttgctctccttgcagcccagttctttcctaactttctttaaatccctttcctctaacagggtgtatagaccttagttagaaaaacaggtagtctctaaatgggattgctctttattgttaatgaaatgaatacccagggactgggcttcccctccgcttgccctgggtttgatgtggttgtatcccgtgctatcagaggagcccttccttcactcaagtgtgttcccctgcccagctctctccgcagactcctgctgggctgagctttccctgctcttaagagtcaggagtggctcttgctgggatggaatgacccgtctttggggctgcctcatgagcggctcttgtgaacccggatcagttccgatgtgtaaactctaccgcctggccttcagcgaacagatacagatttctgccaccttccatgaccctacagttcatgggactgggtctggggcagtgccagaggcacgcatggaggtgtgattctaggtgagtcctgcggaaaacctctggcccacccgtgagtcacggacagaacatgcagactcgggccttggtgacataagctccgcattgctaaaaccgcgtgacctcgagggctgactggcctgagaaccctggatggcgctctcggccacccccacctcccaccccaacctcctgggcttcggtcagaatccacagcccgtgcccgaagagcgcttcccgcctctggcaccctaccttcgctcagctccagggaaaaggggagagggcagctttctgcagtcagaggaagagtacattttctttggctgctctaccctctgaagtagggcggccagctgaaggaggacacacttttgaggggcccagaggttgtccaagcttccccctgccccctgaagactgtgcactgagctgggcgcagttctcgggaactgtttccacccagattgctggggggcgggggggggtgggatgagggcagagccgagaggctgtccaaggtttgggagagagaaaagtttctcccaggactcgaccttggcctccagcaatcgcgacagctaaaaacgggtgtctcgcttcgacaatagatccccgcggaccttctggcacctggttcactagcgcccgcgaactctgcctcgggagacttattgaaatccggatgctcaagccgggaggcgcgcagtaaccaggaggatgagagggccgggtttgggctaggaaagcggccttttaaaacagatgtcagggggactgcagccccgagccatgagaaaaaagttaaaggcgagatgacacgcactgaattggggcaaacattggaagaggagacaaaactgcgtgcttgagcaccggggtgcggggagggggggacaaaacccgtatccagtgcaaattaaaatcttgggagtaggtgggggctgctgcgcgcccttcaccctcagttcccctattaaggattctgagtccccatgcactcctgtcctctggctccttccttcctctccgctcggccggtgagaggcggccgccggcgccccagcagcagctagatgtcaggcgaagcccggagcgcggagcgcggggaagggaggggaagggaggggaggggaaaggaggggtggggcggggagcgcgcgcgggctcggccagtgcggggtggtgggcgggctgagcccggggacggcgcgggaggggggagggaaggggggcagctgtgggcagggagccgggctcggccgccagcactaaagatggagaggcgccggggccttgcaggggagggggctcggcgttgacgtgggacgcggcggaggcgcagcagccggtggtgatttgctaacctcgcagcagagaggagttgagggcgatgagagcgggtactgcgaactgccgggcgatgctgtcgctgccgccgtgatacggagagcaacagttccccagcaacacccctccccgacacaggcacacaccccccgacaggcacgcacacccaccccacagtgcccggctcggctgcggtgagtgaggggccgggaagaggcgcaccgcccagcgagcgccgcgcgccggggcttcccggggctggagaggtctggggggcgcgcgctcgcttcggccactcggccgctgggcttgtgccttttttatttggcgtgttcccttcctgccgctgcagccgtcgccgccaccggttgggggtcggctagaagggggagccccggctgtcagcctgggcgcagctgcctccccagcccttcctcttcagggcacggtcggggtgagaggtggggggcgtagcggtgtgcgggggctgagggcgtgagcagaggggtcggggatccggaggctttgtaccgccaggggctggcggagcaacagagcccgtgggtgctcttatgtatgcggaccggtgcgcgggcgcaagataaggttgtggtttatttatttgtgtgtttattcgccggccggctgggaagctagaatcggaggagctgacgagtagatctgggggcggaggggagcaggactgggactgcttacgttttgtttctctttgagaaaacgtggtgggctttttcttgattggacttgatccccaccccccttttgcaggggagggagggaagctccagagggtctgcagcgctgcgggccctcctcggctctcggcgggaccggcggtgacaccggagctcgccgtgcgctcccggccgctctcggtgggtgccggtctctgcacctgatgcgttcgggatgcctttcccaccctggcgcgcccgccgctagctcgcacagcgcctcgcacactcccgcacgcgcttgaaatgcgcacggtcccgccggcccgcggaaccacccggacgcacggagcgctccgcaccgactcgctcgccgcctccccgagacgctcgcaccgtgcttgggccgggcgcgctggccgctggcgccgctggccagaggcctgggacccagccggtcgctcccagggggtcacggccctgggtcggagagggagggcgggcagaccccttctcgcctttcctcccacaactcgctgcggggcttttgtgcttccccttcgccgcggggcgggtccgcctcccctgccgctctcgccgcggagtccagcccgcccggactgtcgccgttcctccccgtctctttcgctttccctcgtccctagctcagctctccttctttcaggagtctagctcctcgggaaaagttgcttccccaagtttgctgaagtcgtctccaagtctcggtgggggtcgctgggaactgggggggtgtgagagcgcggtcgatccccggagctcgggcgggttatcgccggctcttccccgcgccgcctggactggacgctgcagccagcgccagccggatcgcgggcgccgagcggcgggtgggggagacggctgccccgtgggcgcccagatttccctcaggacccaaaaagcttgtttcagggcgccaagcttccattcttttggctgttccctccctagttctcagaaaccccgatgtctgcgggaaagcacgcggtggctcggctcggctgaatggtcatcccaaccttgacggcctccgtccccaccccggggcgggcagcaaaaatgtcttgaccagccgtcctgtgaatcctttctgcgtgagcttggtggctcctgaactgatagagctccttctgggggtggaggcaagcaagcagtgttcgaagagtgagggagagaccttgctgttccttgctctcagtgcattcactgcaatattggtcgctgtaagacagacacggggagggtcctgggcctgcgcggtctttctaacactcctttaagcgaggtttggagtctaggagccctcttattgatcccggacaggctctgggagaggcctttgtttcccagccctgtcttcccttcgtactggttgtaactcacaccacaggtgctggtgccaatatcacttccagcgcctctgagccatgtccagcatcccttgctgcccctggtcacaggacttgcagactccttggagcctgtgggacacacgtggagttcacacacccagcccagcatgagcactcctggctgtaggggaccatatttaactatggtctctctccataccttaatgacccatccttcttcgttttttagatcctcctgtccaccgggcagttgtgggcaggagggtaggtacgacaccttacgtaagtgtgtgtgtgtaaacacacacacactttttttttttttttctgagacggagttttgctcctgttgcccaggctggagtgcagtggcgcaatctcggctcacggcaacctccgcctcccggtttcaagtgattctcctgcctcagcctcccgagtagctgggattacaggcgggtgccaccgcgcctggctaattttgtattttttgtagagacggggcttctccatgttggtcaggctggtctcgaactcccgacctcaggtgatccgcctgcctgggcctcccaaagtgctgggattagaggcgtgagccaccgcgccctaccccacacactctttctgtctgtctctggctggtgtacatacacacagttcagattttatattatacatacaataactttgaggcttccgtgggtagaaatgacccaagttagtgtgtgggttgtgtgtgttcctgttagtacctagggatggggacaggccttgggtctgccagtgctttgcagccctgagaacagtagaaggccagaggccaaggctgatggtgagaggatagcctttgcggaggagagcccagtgtccatagatttctgtggccatggctacaggctcctggcctccaatgagtttgactctgcttctggggctcctgtagtgaggcagagtttggaaaaactgtttaaagataaggcttgacatccagggggctggcgtgaagctgacaaggaaggggctaaagtcttgctaattttaagtaagtgcacttcatcataatgaatgttggccttgcctagggagcccctactctcagacacagagaaagctgaggacttataggacttcactacaattttcatttcacttcatctaacagatgtcatagagtagtgaattaggcatctgctgtggcagaaccttctttttactctcagcatccctggcttgaaaggcagatttgtagatttctaggaagctacttcaattaaaatctctaagatcctcttgctaagggcttggcaacagggaggagggggcatgttgtagtggttgaattcttacttttagggacactgatgaatttgtcttttgttctctcatctcttttgcttcttcccctcttctttctcctagcctcctctattggcccaggaagcccacccagccccgccacgcagagcccagaaggaaagaaagcctcatgcctgagccgaggggagcaccatggatctgacaaaaatgggcatgatccagctgcagaaccctagccaccccacggggctactgtgcaaggccaaccagatgcggctggccgggactttgtgcgatgtggtcatcatggtggacagccaggagttccacgcccaccggacggtgctggcctgcaccagcaagatgtttgagatcctcttccaccgcaatagtcaacactatactttggacttcctctcgccaaagaccttccagcagattctggagtatgcatatacagccacgctgcaagccaaggcggaggacctggatgacctgctgtatgcggccgagatcctggagatcgagtacctggaggaacagtgcctgaagatgctggagaccatccaggcctcagacgacaatgacacggaggccaccatggccgatggcggggccgaggaagaagaggaccgcaaggctcggtacctcaagaacatcttcatctcgaagcattccagcgaggagagtgggtatgccagtgtggctggacagagcctccctgggcccatggtggaccagagcccttcagtctccacttcatttggtctttcagccatgagtcccaccaaggctgcagtggacagtttgatgaccataggacagtctctcctgcagggaactcttcagccacctgcagggcccgaggagccaactctggctgggggtgggcggcaccctggggtggctgaggtgaagacggagatgatgcaggtggatgaggtgcccagccaggacagccctggggcagccgagtccagcatctcaggagggatgggggacaaggttgaggaaagaggcaaagaggggcctgggaccccgactcgaagcagcgtcatcaccagtgctagggagctacactatgggcgagaggagagtgccgagcaggtgccacccccagctgaggctggccaggcccccactggccgacctgagcacccagcacccccgcctgagaagcatctgggcatctactccgtgttgcccaaccacaaggctgacgctgtattgagcatgccgtcttccgtgacctctggcctccacgtgcagcctgccctggctgtctccatggacttcagcacctatggggggctgctgccccagggcttcatccagagggagctgttcagcaagctgggggagctggctgtgggcatgaagtcagagagccggaccatcggagagcagtgcagcgtgtgtggggtcgagcttcctgataacgaggctgtggagcagcacaggtaggccccgctccagccccgcacctgatgtaggacttgaggccctcacacccctccttcacaccctggctgctcccaagttaggggcctggctcccctgtcttggcaatttgtgaaaaaaccagaacacttcttctaaagttctggcggggaggggagcaggttttttaaagtgtagtgagggggcctaggatctttccaaaaagcaccaggggacactcatgggcgcagcttcttaataggcccttccctttgttttttgcttttgggcccctgtttgttttttctgctgtttggtctgttctcctttgcttggagtgactgataaaatggagagaaggagaaaaggagtgggatgagggtctcttgggccctgcatctgaccatgttactaggtttcaggtcctcgggttcccatgcagtggtccctgtgaagacagcctgtccctttctgcagcttgggagaatgggagggtctgggggctgcttaagccacaagagcagctgcaggttctgaaccttattcctggtgaaagttaatctccttgctctgtctcccttctcattctctgatcctgcacatgcatttagggggaattgatttaaatgcaaggggaaaggatgggtataagagtcttggtcttgcagcctgtgaagtctcattcttatcccatctctgctcacactgaactaaatgccgcttcaggctagcattggcttccctccggcttccgtttccttctctatgaaataaccattcattgagctcttatgacatgtttggttcagtactaagcactttccatgagttgcattttcattacaacagccctttgagataggtaatgtccttcttttttttttggatgtgaagtttcgctctccttgcccaggctggagtgcaatggtgtgatctctgctcaccgcaacctctgcatcccgggttaaggtgattctcctgcctcagcctcccgagtagctcggattacaggcacgcaccaccatacctggctaattttgaatttttagtagagacgggctttcaccgtgttggtcaggatggtctcgaactcccgacctcaggtgatcggcctgcttcggcctcccaaagtgctggattacaggtatgagccaccgtgtccagctggtaatgtccttcttttacatggaacaatactaaggctcagatgtcaagtctcttttctagggtcacatagatagtaagaggcagagctggattcaaatttaggtccttaccccctggtactttgctgcctcttggagtcacttagacttgaagaggatcatgtctatggaacagagcgttttgaagattgcttataggaagtggagtaaataacaggggggataagtagcgagtttgttttttttttccttgcttctgtcataaaccacgtgcccatcattttatcctctagtttctgggtcagatgaatggagtcaagaaatccagctttctgttgtcattgacgacagcatttggctgcataccctgtggtctgctgttttgctgatcttgggtggattctccacttcctcccccttcacccccattcccctgttgctcgttcaggtacgggggatgtgagtgagaggggttggggtggggatatctggaagttgatctcatcacccctagccggaatctgctctgaccctgcctcctcgacagctcagaggcttaacttgtggaaagtgtggcagagctaaacgtagccgactttttccagtgggtgcgaaaaataaccgccactaaggtgtgtcttcttgatgcttgtaccgctcagaaatagactgaggttatgtttgtttttgctcaaactttcctaaagaggaaacccgctccccaaagttgaccagatagatgtatcatctttccggatgtgaattatttcggctgtgtgctatgagaactgggtatggtgggaagtaattgtttttctggctctcatcaggtcctggttcctggttgcttttctttacccgagagggccacaaaagataccactctcctgagacttccaagttccccttcagcaagaccctcattcctctggggagagagggagagttggccatgttatattcgaaagagcctgggtattggaattggccatatttagtggtgagagcctgtgatacttatttaacctttctgggccttgtttcactcactacatttttttttttttttttttttgagacggagtctcgctctgtcaccgggctggagtgcaatggcgtgatctcagctcactgcagtctccacctcccgggttcaagcgattctcctgcctcagcctcctgagtagctgggactacaggcacctgtcaccccgcccagctaattttttgtatttttagtagagacagggtttcaccatgttggccagaatggtctcgatctcttgaccttgcgatccatccacctcggcctcccaaagtgctgggattacagctgtgagccaccccgcccggccttcactcacttcttaaaatggagacggtcaacagggttggtgctgaattaatgaagtaagatccagaaatcactagagctgtgatgggcacatagtcaccgcagcggtggagaactgaccatctgtcccttgtgttgtttaggcctcatctctgcatggtcctcattggctctgagttctagtgtgtagtgtccacagtgccaccctccatgagggttgtgttgactgtgaggtggtgcagagaatgtccctgtccttgtgagcatatgacagcaagacactggccctggaatcctccgtgtcacatgtgggctgctgacaggaagaatgtgcttttgttgttgttgttgttgttgaggcagagtcttactctgtcgcccaggctgcagtgcagtggcatgatcttggctcactgcaacctctacttcccgggttcaagtgattctcctgcctcagcctcctgagcagctgggactacagatgtgtaccaccatgcccgactaatttttgtatttttagtagagatggggtttcaccatgttggtcaggctggcctggaactcctggccttaagtgatccacctgtctcggcctcccatagtgctgggattataggtgtgtgccaccctgctgggccgagaatgtgcttttgactgagggtggaaagtcagcagctgcagcccaagaagttagagccaggggcagtgcctttgatgggaagcttgggggtctaaagaaatcagaaaggggagaaaataatcctgcgtgtgctcagccctcactcagatcaacagcccctcgggtcccagctagatgtactttgtagaaggctttttttctccccctcaccctcaaaactccaggattaatgtgctattcccttttttctactgttctctgtctccccccaacccatcagcagtctgagaaatgctatggtggaaaaaaaaaaacaacagccctataaccagtacaaacaaaaagccaagacaaaaaaaaaaaaaaaaaaaatcagaaggggagattttgaggccaggaagccatggcattcactggaaatatatcagtgataaaataacaggctacagggtttattttattttatttttaagtcaataggcctgagtgttggtaaagactagatacccagcaatccttcttgcatttcttcttggggtcggggggcagaagggaatggagaggaaatgaaggcggattgctggtaagtgaggcaggaaggcagggagtttattatggaatgtcatcggtaagtttccccatgatttgatcccaagctggtgtggagtgaagggtaagctgttggctcaacagatagtgagaatcaaacttagtggagttgtagatcctgtttcctgcagcggacagcaagatgtacaagccgtccactgcaggaatgacgtgctgtaaaagggatgcagtgtcaagtgtagtcatggatgggtgggaagaccagacaaaggcatccaatgggactgacttacctaaacaaaccagaaggaagtcagaacagtgggaagatctgatagataagcagtattctgcaggcagatgaaggagcaagctttgggcccccaaatcttcaccagtgcatccacattacagaggataatgcctgagggaggggaagatcatctcaggattctggaacactgggccctccctttcttattccaaaaggctggagcagttctgcatgtaggcttctctggaaatggtctaggaaccagctcatccaggccaggagcacctgatcattctcagagttacgtacatatgcgataagattgcagggaacagtatagttctatagacttaagtgtgaacatagtcctcatttatagtccctagtctcccatggctcacgcagcttggtctttatgtgtttctgaatttagtgctgcagaggcacaatggggtctggtttctggatcttatacagacaagcacttaggtcagctgcagtggatgtcctgcacagacaccgtcgcaactcttgcctggttcctttttgtttttggagatggagtctcgctctgtctcccaggctggagtgcagtggcgcgatctcagctcactgcaagctctgcctcccaggttcacgctattctcctgcctcagcctcccaagtagttgggactacaggcacccgccaccacgcccggctaattttttgtatttttagtagagacagggtttcaccgtgttagccagtatggtctcgatctcctgaactcgtgatccacctgcctcggcctcccaaagtgctgggattacaggtgtgagccaccacgcccggcctattgcctggttcttgaagggattctcaggaaccacagggaatgtctgagccagctttctggatccgtgtgtacagcccttcccagaggctttgtggagccagctgtacggtgcatgagctttgtggctaagatatcagagttctgcctggcccttggccttggtctctctcagatggtcagctgctctgtttttagtggttgatcatgtagaaggccaacaggtgttgaccttggtttaggctacttttgggatttttgaggtttcctgagactcttggttttctttcatcatcccgtccagaacctctgatgtcaaactaaattctgtttggaaaagggtatgctgtagaataatgatagccacagcaatgatattaataataccttttatcggttgcagcattttcttctttgcaaagcacctctaatgactttatctctcttgccctcacagccttccttgagtgggtacaggtccataatcccatatctgtgataatgaagtctgaaaagctctgaaaactaaaaagtttgcagtaaactcatttagtggcaaaacctgatctgaactgatgtgaggctatatttatcctgcttagtttgaatattcatatgttttgctgcaaaaatattaatgtgtttgattacagagtgctgccctagactctgctggggctgttaaacacgataggtgtcagagtacctttcttttttttttttttttttttttttgagacggagtctcgctctgtcgcccaggtcggactgcggactgcagtggcgcaatctcggctcactgcaagctccgcttcccgggttcatgccattctcctgcctcagcctcccgagtagctgggactacaggcgcccgccaccgcgcccggctaattttttgtatttttagtagagacggggtttcaccttgttagccaggatggtctcgatctcctgacctcatgatccacccgcctcggcctcccaaagtgctgggattacaggcgtgagcaccgcgcccggcccagagtacctttctaaagtctgaacagttttggtcgttgaagcacctgaaggttttggataagggattatgaacgattatcattctctattgacaaatgaggaaaatgagatttggagcaagtaagtgacttcccatggtcacacagctataaatgggtagaaccaggcactcagcttgccttctaattcacagtcctgggcgctctgcaccaggccatataagaacatgagcattgctcttctgggtcaaatccatctgacctagtctttggttgccatcaccatgcctaagataccaccattggaggctacaaccatcttccttgacgtcaatcctaaaggtcaggtgtagcttctcttagtagctatttatggctgccttgtcattcacagatttgccaaaatcctttttgaatccatttccatttccaggaagtatcctttttaggggtgatgaatgacaagtttataatctcctgggctcctggaaatctggtcttttggagagaggttgttggttgtgaagataggaagatggcagaaggctttgtagtggtgaggccaggtctagacctagctctgcgtttttcagctctgtcaccattgacatcgtttttttcatcgtaagccttaacttcttcatttttaaaactaggcacttcagtgagctctttctggattgttgcgctctttaaaaaattcttttattctttgtgtacccacttatatcttcatgaagtccttttggttaattgaattttgctgttttggaatctggattggcagttcagccagttaagtagggggtcagtttgatttgattctgtgtgttctgactttttttttttttttaaatactttaacctgcttagggttactgagccatctgggatctagactgaactcttggaacttttgaagatgatttcctttattttattttcaatggaggaaagttgcccactctttcatctcagtgagaagtcccattttaatttgccatcactattggatggagccgctaattgctgggagggagaaagctatagtttagcaacatgttttcctcctgctcgttctaggaaaactattatgaatctttaaaatagtgattatcctaaactgttaaaatcaaattctattcacagctctttgatttcttgctaattcaggagagaaacttttccaatcactttaattttttttattaatttaaagcaagccctgctgaaagcccaagtatatatgacttagagtcttactaaatgaatacaggtgtgcctcagtttgtccattggagggtttctgaattttccataactaaagattttctattctgttttggctgggtgtgtggggtgaaagctcttactctctggcagttatttaagtagtaagaaatttgctacaactcttccccacccccacgttttacagataggaaatgagcactttgactgtccaggtcagacttctgattttgctacttactaactgtgacagtggttgtgttacttaacttctgtgtgcctgtttgctcatttgtgaaacagaaataatagtagtacctacttcattgggttgttataaggattcatcagaaaatatttatcctgtgtgaggaacggtggcacatagtaagtgctccataagtgtttgctagggtatttttcttgtcattgtgtgaagtaggtcatgctagccatgcagggtgaaaaatgtgttcatgttggtccagatcctgctttctccctgagaccgttcttccgcataggcgtcaatccgtacagtgctgtaaaactgctgcctcgggcacctcatgtttggggctgagacattgcttctgcgtcttccccagaagctgatctcttgtactgtggtggccagggtactctttgtcccattgacctgaggcctggtgagtcattccagttctcgtttaaatttagccgggcagcgctccactgccatcgggtccaaatgccggggaggctcactgatgcggtgtcctgttgcctgtgcacgtggccaggcgtgcacatcactgtgcttatgagagagatgaagagcacagataccaccttactgatgggggtcctggggctgggcttgtgggtgttgggggttccagagctccttccctttcctgcctgtcagtgcaggatgcttctaaaatgtggactcagcagacattgttttgagtgcttgctacatgtcagattctgtgctaagtgcactcacagccagcatctctgtaagacctctagctgtcctgtaaggtgggtatcagtttcacattctcagatgggcggagagaagcccaagaggttagtggacttttctctagtaaagagttgtacaggccgggcgcagtggctcatgcctgtaatcccagcactttgggaggccgaggcgggcggatcacgaggtcaggagatcgagaccatcctggctaacacagtgaaaccccgtctctactaaaaatacaaaaaattagccgggcgtggtggggggcgcctgtagtcccagctactcgggaggctgaggcaggagaatggcgtgaacccgggaggcagagcttgcagtgagccgagatcatgccactcactacactccagcctgggcaaaggagtgagactgtctcaaaaaaaaaaaaaaaaaaaaagagttgtaccaggatttatgttcaggtcttctggctccatgctctctgcagctgggtgaccagggggctcatggcttcaccagctctggcctcctcagttcctctggtggcttcttgcgaggaggaaggttactgcagagggttcagctctttaggggcccaggccgcatggatccaaggactagtacgtcatctcttaccaacacagagagatcagcttctagtgatagaggccttttatgctgacttgaaaaacagaaaaagagagaaaaaagaaacccatttacaaaaataaaaatcccatgctgttaatttcatgccagcataatcagaaattcccctttctactgtttccccttaaaagccccggtgtccttattatgctggtgcagtctggaaaaactatggttgggttttgcctacgtgaggcttatctctgcagctgcaaggaggggatccggtactttattgtcagcatggaaacttccgctaaatacttagaaaaaccttaattctaaattcctagctcactttcaactgtgtcctcgggacctgattttcttcggtgtgaacagattgtgttcagcattgcagtagaaagggtccaagttaggtaagagaaaggacttcctgagacactggggtgttactgagaaagttgttagaagactgtcacagacattttgatgaaggggggacattctgggccatttgaagtggtttttagagttctttcctctttagggccattcggttcccccagaaataagaagaaaagacatatacacgcacataaaccaccaccaccaggcttgctgagaacaagtcaaatgtgccaccaaaccatcgtcttagtgggagatggggtggcactgcaggggcagaaagactgacgtctgatggacttgggtttgaatactagtgctccatggtgaatttgggcaaatgacttcacctctgtgaagcagcagtatcctcttctgtgaagtgaggttagcccctacctctcaatgtggtttttaaagtatgttaatgagatcacttgtaacctaaagcacacagagtgtgaggccacctccctacttcctgcttctctcatgaccccagcctgacaagggagccgctgagccccctgccaccctcacccggcgttgtgctctaagtggattagctcagcgttgtgatcttaatgccattaggcctgttggcacggctctccttgccatagtgagaagcagatgtggccgaccataatggcccttagcgtgatccatcgggcccacagtgctggggcaaccattattagtgttaatttgggggagctttttatggtagctgggggaaatgtggagggattgttggaaatttatttaagctgttcagcaggttaggtgctgctggggtctactatggcaaaaccctcagctcccccaacccatctctttaaggaacgtccctccccaacaccgaagcccaggcctgattacttccagagttggagagacaacttagcaggctcttgtttcttgccgatgtaccttattagtagcacctggcatcataacccactaatgggaaccagtgctctcctcctgcgtggccagtgacaagtagccctgtcagccggagctcgccgtgcgaggaagttcctattagctttatggtcaggagaacttgtcctgttcaggaaatgaatgttgccgctaaaggtccgcggccctgaccctggcggcataacctgtgcgggccggggagaccctgtgcaggatgcttgggatttcagcccctctctggttcttgtcatatgtaaagagggaatcattgtggtatgttgcagccttgaacttttgatttatgcagtgagggcgacttaaccgtttccatgcctggacggctgtgcagtgacagagccgtgttgtgagcgtatgtgcctaggtacatgtgtgtgtggggtggtcaaggggaaggagagacccccacgtgctagcaggggctgttgctgggagcgggtggatttcatgggaggattccttttcttttttctttttcttgcattcttgcagcatctaaatttcctgcgattgttggctgcaaagtggtaagaagctggagagcattgtgtctggaattgaacctgggttcgaattaatcttctgtctcttagaggctgtgtgaccgtggcaagattcctcaccactcacttcctcatctgtgagatgaagttaataacttctgattcatactggtggtagagcagtgttgttaagtaggtgatgtatagagaatacatggcccagcgtccggccagtggtgtggcctcaggttgtatacttgaaaggatgtgtatacttcagtattttttccattgtaaaattaagggttttttttctttttttcttgagacagagtcctactttgttgcccaggcttgagtgcagtggcgcgatctcagctcactgcaacttccgcctcctgggtccaagtgattctcgtgcctcagcctcccaagtacctgggaccacaggggtgcaccaccacacctggctaatttttgtatatatatatatatatatatttagtagagatggggtttcgccatgttggccaggctggtcttgaactcccgacctcaggtgatctgcctgtctcagcctcctaaagtgctgggattataggtgtgagccactgcgcctggcctaagtttttaaaaattaaaaagaatggcatagtgcttttttgctctttaacagatcaagaccaaaagttttccccccatcatagcccaaagtcctaaagaaaggctacttaagttgttcgttttcttttgtttctcccatgagtaatgtttctaagtgtgatttttgcagagaacagcagtgtctgacctcattcttgaggggaacttttctgcctgcctcttcttgagaaaaaatgtttgtgagttgtctggcaaatggatgcgttacttttgctgctgttgctgccgctgccgttttaaaggcccctggtgacaaaggagtgaactgcactttcggggaaagcatgccggaatctggcccagaaaagaggggccgctgggggaagggtttggagatgacgcctcctcaggaactttaaaagaaatctgtccatctgtctctggcatttatggcatcgttgacagcagttcaaggaaaaataaaaataagttcttatctgattgcggggctgattgcaaagccgaaggactagagtggccagcgagtcgggcggctggatctggagttttggagaaagggccactggctcatttctgggcacgcacgctcacggaggcaagttctcacctcctcgtgggcttctcttcactttacgtggaaaaactgtgtacgtctcaaattaaaagcagctcttgccccgcttagagccggtgaaagctgcttcgaaggcgtttgtagagtagggattggaaatgttcaatgcaaaagttaaatcgtgacagttgtcccctaaatgatctgctaaattaaggatccgctaacatttgtgagtctacctccctgcattccccccacccccacccccgcccccttggcagaagggataaagatggtacctaaaaacaatgtgaagcggctgctaaatcgagtgactctaaaaacatttttctttccttgaagttcagtgtggaaaaccagactggacttgtcagggatgcagacctatatagggcccatgtgcctggcccctttcctcactttctagcacaatggttttcattgccacctctcccgcgcctttccccccttcataattatccactattttactttctgtgtcctgacagctacaagagtagtttttgtttttttgagctgagtagctgctaaatattccccagcagccagattcaacggctgggggggagaataggccaaaccttggcatcccctgttgcaaaagtgaaaaatatttctgtttgcagttaattttagtggcaagcagatcatgttaactggatgtaattgcttccagatatggccgagggttttgtgtgttgagatgaagggtctggtaagtgcttacttcctgtgtaaattagcctattccattcagtctttcattctggccagccctggattctgtcattctgctcccattttccccctccccagcctgcagcctggtgtgagaagccgcttgctatgttcctctaagtgtaattcttttgtcacttggagccactctcctcttggttcttgatgtgagtttgcccttaaataatgagaagggtttgaaaagatgccacctggaccccaggccacctcccgcctctttcccagcaaaggcagatctgaagagcatctcctggtcatgggggttgcatcttggaacccagaactccttgttttctatgcatttttttttcctactgccctctgacccccgactctcacctgggagaacaccttctctttctctcaattagtccgactcctcctcagcctgaactaagcacgttccagtgggtccgaaatctcagaaaaaatgaaacggctgttgcgcagaggagaaggttgtggccacagaaaggagttgcctcatcagacgtgaagccgccaccttgccttgcaaagcaggctgcacctcctgacacacctgcccctccctgcaagaaagggaggggaaatcccacccaagagaaccttctccaggttcctgtgggtttccagggttgcaactgaagaaaagtgttaagattcatgttctcctaaattctgcttttgtcctgtggccagtcccacattcttagtgctatttgcataagaggttgctgtttatcttcctatatcagccccactgataacccctgtggtctgtttaacaacctatgaggagtagattacttgataaatgccagtttttccaatatgcaaagataaactgttggggtcagggtgaggggtggtgtgttatgaaggaggggacaggtggggagccaggaccctcttttagtgggctggagaagtgtgaaagagcctgatgaaagaaaacaggtagcttgtcacatacaacagctgcatttatcatacggttgatcagcttcctgccctcacctacttttctcctccttcatgtggacatgcagagtctctgagaacatttcatcaagtgggttgcctatgcccacattaatacaagatgggaaagggtggaggttatctttgctttttaagttcccatctttttctcccttggtcctctcccacccctacaagttgttggctggtaagcaattgatgctcagaaaaatgatgttcatctgaaatcttaaatgagtggactttttctaccttccctgactttgcaggtgcttcttgaagagccaaggagaaaagaaaacttctgacctcatcacctagtcaataagctgtctgagaaacaaacaaaagagtttagactggctgctaaagctaggaacccagctgatagctttgttttgatgtccttgtaatgtttgcggatcgcagagggtgctatttagagcagggggcatctactgggacagactcactgggaagttgaaacagctagctcaaagtccaagagatgctaaagatagtgaaatacagcccaggaattgagggggagggggttcctcactcaagaaggagactttctaggagggggcgggcgtggtattttctagggacagtatggaatgaagggaagaaggttggctttagaaggaggcaccctgtgggaggctgagacaggtgggtcacctgaggtcaggagtttgagaccagcctggccaacatggtgaaacccagtctctactaaaaatacaaaaattagctgggtggcaggtgcctgtaatcccagctagtcgggggaggctgaggcaggaaaatcgcttgggattacaggtgcctgtaatcccagctagtcgggagaggctgaggcaggaaaattgcttgaaggaggcggaggttgcagtgagcccagatcctgccgttgcactccagcccaagactttgtctcattaaaaaaaaaaaaagaagaagaagaagaaggaggcaccctggatgaagactcaggctccagaatttactatctgtatgtcttgggcaagtggcttagcttctctgagcccctgtttacttttcttttgaaaatgaccaccttgtccatggtaatgaggataaaaaacgtgtaaagtgcatagcagagtgcaggtgtactgggtagacatgtatgattgcgctgtagccctgttatggcccggggagaaactatgaaaggaaccagtgaaatcttttgttttgggcactgctaaattgatgatagtactaaccctgtgctagcagccagccggtgaaataataggtgaataatgttagtacattgtgaatataaaagtttccatttgcaaagtgctactgctgttctaaagaagccacatttctaataaatgattgcttaatcctgtgatgctgccacagccccacagagtttgggaatgtttgggaattctttctgaagtgtgtgccgcattcttttgctttgccttttgggagggtagatgtgactattggaaatggtcaaaataatgcagtagcaaatctgttgactatagtgagtgataagcactgtcggctgctgtgtctgactcggaaggcagattctggaaggggtgtgtggggaaggcttgttggctcagcactggggtgagtgttggcctcacttcttaggtgggaagtggacaaggccaaggggcttttgatttccagctactatggctggactcccagtgaggaaggagtcgctgccatggattgcctgggactgggaagactccttttaactgctgtaatgtttctgcatttgtggtttggcctcctgtgagtttgggctccggggcggcacttctgttgttaaaagaacagaaaagaaaacaaaacaaaacaaaaaaccaggactgtcactgttagatgttggttgaggctagaaagaatggattgagttttgaccccctacaccccagggagtagggaggcctgggaggcacagtggcctgagtttgaattctgactctgcctctttggaaggctctggaaggttaaaggagcttgtgtgttcaaatcttagcctggtacctggcatatactcagcatgtattttttcccctttcctgacaatgttccttgccccgaacacttgaatagtggagagaggaatgtttgcttttcctctccattgaaccaacactcgcccatccactgagcccaagattcaccttaggattgtctgttggactcggctcttttgtgacctaacagtgcaggggccttgtgctgagctgcacatgctcgctctcgctggtgctccctctctctctctctctctgtctgcattatttatagtaaaccatattagaacagagtgttaaagaggaaggatgagtcattcccattgaaaccattgatgacataaataaaagcaaaatgcttactatgtgttttgtgcagtatttaaggccaggttgtgctaatttgaatgctcccaaactggatctgtgaaagcatacatatgtgggaaaaaattcaggtttaactagagggaagttatttattgaaaatccatttcagtatctgctttctcccttctatttacttcagatccatattcatatcatgcttgttgttctggctaacgagagggactggcttattcactagctaaggtttgtttattttcggaaggttgaggaatagcacagagaggttgtctaagtgtccctgtctccattcctcctcttgccacctgttgaggaaggcactctccacctgctttgcaggcgtgggctctcaatgtgtccaagaatcacagtcagagctgaagggcccttggaatcatttattgcagcatgctcatttgggaggagtaagtggaggtccagagaggttctgtgattttccctaggtcacacagcaagctagaggcaaaaccaggaccctcactcccagcccactttaattcttccttcacaagcctgcctgtgactgcccaggtctgttctctgcttctaccaaggggtaggcaagactagaatctgacttgagagcagtttcagatctttgtctgtgagggatgctggggggtttctggcatggtgacttgcctcctgggacactcattaacctctctgctgctgagcctgagcagactaatgtacatcaactccttaggatttacagacaatgccctatgttgggggttttgagacccaaagattgctaagacatgggacttttccttgaagagcttatactttgagttaaaatatgtatgttgatatctatgacagagaataggaaatggaaagactatgatatatatattcagagttgaaatgacttctgtctggagtgattcattttaaattttaaaaccttgttgagcacttactgtctgctgggcacctgggtaggccctgggaatactgtgatgagcaagatagacaagacgtctaccctcctggggctttcctaatggggaagaaagatccttacttagctagcagtcctgtccgtaactgtgtaagggtgattttgatacatgttgggagcctggatgaagcagcacatgagtaggatattaaaggataagtaggttttgaagacggggacagaaagaaggaaaattgtggtcagggccaggggagaaaacaaggagtaactttctttggcaggaatgagggtgattcatgctggaatggtaggctggggtcagactgtggtgctataaatgcggggagagagattagagaaggcagcatgaagaatggagagaaaatgagtttgaagttgagcagacccgggttcagattttcatgctgccacttgcaaactgtgtgatgttggccatcaaggactgtgaactggctgggtgcagtggctcacacctgtcatcccagtgctttgggaggccaaggcaggaggattgcgtgaggccagaagtttgagactggcttgggcaatatagcgagacgatctttccaaaaaaaaaaaaaaaaaaattaaaaatgcagctgtgcatgcccataatcccagcttctcgggtggctgaagagggaggatggcttgaacttataagttcaaggctgtggtgagctatgatcacgccactgcactccagcctgggcaacaaagtgagaccctatctctatttcaaaacaacaacaacaacaacagcaacacacaccatgaactgtagcttcttcattcctacagtgcagttattgtgtgggatagcctgaggatttggggtcgtgtacttaacacactctgcacagtgcctgtaacagtgtagttgctcaataaatataactgctgtttgttttaactgctgtttctttttggactttatcccgggagagttggagccttggaaggcatttgaaaaggagagtgacgtgactggagtgctccatactgatgtgacatccactaggcatgtgtctgactgccccctgctccttccctgccttcacgagcctgtctgaaaaggagtttagtgcgtgatcatcagctcctaaggagacctctcccctgtatcttgtacctggcactctaccaagatttgatgaaaggacatgaaatggacccttgccacctctcggtgggcggggaagctgggagaggggcctggggagagggggtcttcagctgtcaggatcaaaggaagtgacactctgaagctggtctgccggactgttacccgtctctctaactctcttttaatagaaacccagtctcccctcttgcctccctgatagtgaacagcgacgctatctcccgcgggccagtctcggctgtggtcgtagcactacgcaatgtctgcaaaccgacagtggcatggggagataagggccccaacgttgtgtaacgaggggcatgggctgtttgcccgagtggctcctggcccctgggtaactgctaacctcaacggaggagcgggccggccttggaaacgccgttccagggcccctcgctggttccacggatgcctttttgtggttggataaaggaagctcatgtaggccgcccacagcgcagcatggccttgggctacgggtgtttggttgttttgtttttctcttttctttgtcttttttaaaaaaagaagttgaaagggggatagtcttgcttggcacctaccacctttaacccaaaaccaaataaaacaaacagttcctaaatataaattaaacttcaacctgcagtatagacatcctccttccctgcccgaaacccactggccactggaggctagctttaagaaattggttttggagactctggcttgaaaaggagccatgcccacttgtctcacgtcccagtcgctggctccagggggccgtggtagaacatatattgtacttcagctgcctttcccctccaagcttcctcagccacccacagccctttcagatgagctgagccctagcactgtgccctctcccctctgccctcttagggtgatagaatccactaccctgacatctggggttgccctgttctgctgtggtgggagatgggctggaagggacttcggaggctctcccgtgttctgtaccacccagcttccccttggatccctccacccccgcagccaggagagggaagtaactgttctttgagcaggacatttcattttcaaagtattcttgatgccgcccccccgccccaccgccaagaattctgctctgtgggtgatacttataaggtaactatatggcttccttatttaggcagcagtttctcttctatgattttagttcctctcatgattcttataaccctctctcagatacttccaggatgataaatcttctatcactgtttcatctgatcacatcagggtgattatatttcgtgacataaccaggtggctttaatccgttggtggaagaaccaggctctcacctccattgtttaagatgttatgtttctactaatctgtccactgagtgtctccatcctattgtttccattgcatgctctcaggttatttcctttgttcttggctgtctgattgctcccagaggctgcagttattttattttatttatttcattttttggtgggagtaggggattgatctctctcttgcctttagcttgaatgggtggtcatttccaggcttacacattgctccatgcccactgtaggggtctggcttagagatggtcgggggagagaaggtggtgatttaaaagatttggaggcggtggcttacattgattttagcttatctaaccctttagctagaggctgctcttccctcagagtgtccaactagctgtaacttaaagcaacagagaaatgtatatcatcccttttcttgcattaattagggctgagaaattcattatttagagggataagagctccggaggaggagggttttttgaactaatgtagagatctgtggccagctgtgtgattctcaggtagcaggtgagggggtgggggttgatgagaggggtgagaaggagcaggtgccagggtcaggcaggggagggagcccccactccgtgcatcatcccagagccctgttcctccaagcccagattagacacccttctccacgtggggcctcaagttagaaatcctgggaggaggccttattgctcaggatcatctgggaatgttgctttctgggtttaaaatacagtcaatgtttagatgagctgctgttcaggcacatggtctggttagcaaagggttaaatcctgcatcccgtttttagtcatcaagctagctcagatctgcccaccttggagccctgtgctttcctgccttagtgggcagagtctaggggacctgtggcatgttcaatgattgaggactcttgtccagattccaaaaacctactgtgatgatgctgttctgaagctgtggtaggcggtgattgagtggagtgtgtagtgaccctcaggaattcttcagaagttaggattttgacgatacctctgataagttgggtttttaatttgctggtttatcttagagtggaggctgtggcccacagcaagtagtacattttccatctcagcccagtgcatggacaaacgtacctcaaaccaaaggttcaatgaagctctatttatctttactatatgctctggtatcttctcttccattctatcttatttcatttaagaacgttaatgaagacccactaatggattgccacccatggttcgaggaggtcccccaaacagtgaggccttagccataggtattcaattcaaaaagcatttactgagcatcactgtgtactaggtggttgctaaatgctatgggggtaatgcagagaaattaataaatccctgtaagagttcactgtaaaacagaaatgacagccatatgtgtatgactttgtgtgtgtgtgtatatatatatatcagactgtatgattaaatattatataagtgaggtatgggggagcagaggagaggaattgaattttgaattttgattgaagattcaggagggcttcatggaggaggtagcatttggccaggttttagagaatggctaggctttggacaagtggagacaggaactgccatttggaggtaggagatgagctaatgtgtggcagtgtatgggtgggggcaggtgcctgtatacaaggtagtgtgctggaatggggcgatgggcatggggtaggatgggagatcaagcagggaaagtggattggggccaggtcctagaatgatttgaataccaagctagctttctggacatttgtaaggcgcacttgataggggttggatcattgcgatattattggaagacaaaactggggagggtgtgagaccatgtggctgctcagaatgcagagcccctctgatgtcctcagccttctacgtatttagtgatgggggtggtggtggtaaagagccttgcagacagcctggcttgggtgcttgcttgaagttcttacgcccactaactcctgccctgctctgtggagcctgctgaatggggcattaggctagtcacacacctgtcctttttcacattcatgctgtaccctttgcaaacattacgcagcagtgcaaactcagccctgggcctcagaggagccaggcgtggccaggagagtgggatttggaacggaagtgcttttgtttttggcattcactactcccccacccccactggcacttggattgtccttctttttctccttggtgtctctcatcctgtccagccttcaagacctcctcaagtcaggcttctctgggaagcgctgtctgtctgtcttggtgcttgctggcttcctcttctgtctcctgtgccatctccagtttgcaccatttgagtataagctctgctgcctcatttgagtttaagttttatccccccagccacaacctaagttccatgaggatagtgattgtggtttatcttctctccctcagctgtctgctgacaccatgctgaatacatagtaggtactcagtaaataatagctaattgagcatttactatggacaaagcactttacttgcattaacacatcccatcctcacaaccacctgtgaggtgaatcctattaaaaggaatacttgggtgctttcagagttattctctccagctttggacttcttgtttcatttgccctgagagctcctcaactctgttgatgctgttctttcaaaggttgcttgtgacctcttagttctcaagagcactgtattaggttggtgcaaaagtaattgctattttagacattactttcaatggcaaaaactgcaattacttttgcgccaactaatactttcccagactccagtattggctccattgacccctcctgttcctgccaacttctccccctcctcctctggtatttcctggaactccctccctagggtcagtgccatgtggtgcctggaactccctgggatctgtgtttgaatcctgacattgccactttctaagtggcaaacactttggccacctccccctcttcctgagtctgtttcatcatctgcaaaatgctggtagtttctcttctcacaggaaagatggtggttgttcatcgatgtctgttgaaaccgtgaccctctctgctgaatgtagaagaagatgaccttaccagttctcctgtctctccagtgtctttcttgacaatcttgtggtttccacaagcaaccctctgtgggtgatttccagatctctacctctagttgtttttcgttttttgtcttttcttgtgtttcacacattcttttccagtagcctcacgggcacaccagtcctgcaaggatctagaatgtgatggtttgagctagttcaacaccttcctctcgaatcgtctcctgtgtcctcatgttttgtggtctctgccctcttcccaggcacccaactgcagactttggcatcatctgtggctcctgtcttccctttgccttccatatccaccatttgcctctccagcctacttaaccagatggctgtcctgatttcctcaccagccttcctgcagtgcacccctgcaaggctcatcaccccacttccctgagcagagtagggctctgatggggttgctctcctgctctgaaccctgcagtggctcactatggcctattctagagaagaaacgagagaattcttagcgtggcattcaaagccatccgggatcctagattccagctacattttcactcttcatccctttctctgcatatttcttagaatgtacacccctgaaggcagggaccatctttttcacatctgtgttacaaccttttagtccactctctagcatatggcaactcagcagatgctgctgttgagtaaactcttatgcttcccttcccatgccatatccttctctggtcatcgcaacagggccaaatctctcatgcttcagtgtaaatgccctctccttgcagcatcctttcctggggcattcttcctccttgcatccagttggaaataatatgtccctccattggagctcccacaccagaagaggtatagataaagccagatacttctttttttttttttttttttgatacagagtctcactctgttgcccaggctggagtgtagtggcatgaacttggctcactgcagcctctgcctcttgggttcaagtgattcttgcgtctcagcctcccgagtagctgagattacagacatgcgctaccatgcctggctaatttttgtatttttagtagagatgcggtttcaccatgctggccaggctggtccccaactcctcgcctcaagtgatcttcctgccttagcctcccagagtgctaggattacaggtgtgagtcactgtgcccggcctggatcttttattgtttgtatttctgttcatttcttccctaagaaaccccacgtttttgtgggcaggacctggaatcctattcagttatacagccccgcttcgtccactgctccccttcagagtctagtgccctggacatcataggtattcagtacctcttgctggcttaggaacaggaggatgcctgatggccagggtgttcctctgaagcagtggtggctgagctttttgaatatctgcattgtgctaagggttaactacccaggcagtactggtggggaagggccccagaagcaggcccagactcaggtattgttaaagcagagtcatctttgctctgaagttttttcttttatcttttcttttcttttttaattgggggaaaccttgtcctaattggcatctttattgtggcaggaataggccaggcagggctgggggagtgtgaagtctgtgaagggaggtggcctgggggcccccccacacaatgcctgattgtgcaggcataggtatgaacacattgcagcctgtgtgcacccacagggtgaccacgagcaaggcctggggacgaggactacgaggcctgcagctgggtcctcttttctccctcctcacccccacccagtacccacgtgattgggccacatcccagtaacaagcagtccttgtggaagagccttcatgaagacctttgctgggagtggcgggcagggatctgcggggagcgttgctggttcaagctggggctttcctatggatgatgtcctgtgaagggtagatcctggagggacagacaggtgtctgatctttggcaggcagggatgtctcatttgtacattataggtattcagtatctcttgctggcttaggcttcataatgtctcatttgtacatcatagccttcagtacctcttgctgatttggttaacccagttgttataccacgatattgatttttcatgccattttctttaggaagattggaagatcattgaggatagggactgtgaccttttctttttttctaccccagtacccaacctggcaggtagcacagcgcaatgatccacgatgtttaataggttgaattgtagagggggcctctgattccaaagatgggggcagaatatcagtcctctccagactgcctgggaatcctcctctctccagcctgggcctggccagtgggagacagaggctgctgaagtagctggcaaggaggcaaagaagatgatgacctagctacggtcctcatgtgcccactggggaatcatctttttgcatctgagttagtcaatgtgctgtgcattctctgcagaatttgtgaacctggtataggtatgaggtgagagaggccaggaggtctggctgctccccctctagacttcgcaggtaaaacccaaggtgtgtgccacgtaaaggttcagaggttttataggcatccagatagcacatgtgggtctctgcccctgcttgcagcctccctggggcagccagccaggctcagggcaggaagctgctgattctgggtcacttggctgctcttgcttgctgctgctgtgattgttcctacagttaagatcttagctccataagggacatacggaggtcatctaggtcatctcatggctctcaggcaagaaaagtagcattattgctctcatgcccactttatggataagtgaccgaggcctgcagaggcagagtggctattccagccattaaatgtggctccctgctattctgttccctgccaggatattctgtggatggttaggggaggggtcttacctcagctaacgaggtgcattttctgtggggtgaggccattcttgtcacttaggtgtctgaggcctgatggtgttggggaatgtcctggttctattcccagggctgtaacgtgggggaaggatggaggaagacagaatggcctctggaacttttggatctttctgagttgaggccttgtctggccaactccgggaggctgctggcatggcaagcagggtagggatgcctggcctagccaggggagctccctctctcccctctgctgcccctctttccacccccatcataaacacgtgtggactttctggtggtgagaagatggttttggagggctgggctgaggtctaggcaggcaagagcttccaaatgtgtggctttgattctcagccttttcatccctcaatcctgggagactcattttaaaacttaaaaaaggacttcattctattggatgctatgtgggcaggccctgggctgttgtagagaggcctgaaacccacttcagtttcctggacaggctgggagtgtgtacccatgggttccctgctgccctattcctggaagacactaatatccctcccaaactcttggttggtttctgctttttttctgtagcattttgtctttgtgggaaattttaagaaacatatgtatggctttttggtttccacttatttattttcccctctgagtttcagatttcatccttctccaccccttccccctgccctaaggtggggctagtgcaaatcgcagtgtgtgtgtagtgggatggttaaagagccgtacatcctcacacctggtgacgcagactaaggcaattaaccttctttagtaaagaccctttcagctgggtgcggtgggaggcacttcgggaggccgaggtggaaggattgcttgagccctggagttggagaccagcttgggcagcatggtgaaaccacctctctaaaaaaatataaaaattaacgggacgttgtggcatgcacctatagtcccagctacttgggaggctggggcgcgagaagtgcttgaacctgagagatggagactgcggtgaggcgagattgcaccactgcacttcagctaggtgacagagtgggaccctgtctcaaaacaaaacaaaacaacaacaaaaaaagcatgttttcctgtctttcccttcctctcctccaccccctggcatgaactctcaactcttagcctgtggatgtccgtttctataaatgctggtgctcggtggtcaccgtagacgtccgagcagcccctggggctttggcttgtgttttctctgtacttgtgagggtggttgccacttctggccttctttgtgctttctttttctttcctttccccaatcttttgttcctccctccctccctccctcccttcctcccttccttccttctgctttcctgtttaaagtatatggctgcacctagcatgacacagttcctatttattcctcagacttgctgggacagtctcctctgtatgcggcgactgagggtgggttccagtgccccagcccactccccttccccttgtttttgtccacttggctggacaaagagaacaaaaccaaatggcctcccctccccctctcctaaaccggtcaagcagtggtattctgggatgattttccctgcaaccatttaaacaagtgctttgatgcttacgagtcattggaatgaccaggcctgtgcgccccttctcactgacacccttagaccaggctgggcctcacccttttgtcttgctgcccctcggtgcccagtgggcgtgggcagtaggactgagcagaggggccgaggctgtgctggccggcagctctgttacagtagagtggaaggaggtcccggccagaggggcaggtcaaacaggcctcttttatttacagtgctctctttcacggcctcactgaaacaggagacccgagaggctccggtgaaagggcactgtgtttgtgcattcaggccttccagggctggctacaaaggtgggggcacccggagcactgaaggggctttttgtcattggcagtttggcttaggggagaagcgagggagagccagtgtgggagccgcctctaggattgtgagcaagtgcctgtttagacagctccacgctgctccttaaaacctattttgtggtctggggttggggcgggggcacactgcctcgatcctcttgttgtgtggagcaaagtgattcctctcttcttgtgttctccagatggttccgttgtcctcacatccattgtggttgaggatacagtgcagagaagaccccgctgtcctctgctccccctccttttctctccaaagagaagtttcagggacagcaatagacttctgtggggcctttgttccttgtagctttcatttttcaattcttcttctccctgtattatcttgctaggccttagtttgtgcatctctaaaatgggctgggaggtgctagcccatacctaatatatagggccgtcgtaaggcttaggtcccataactcatggggttggcttgcacagggctctctcctttcagactggtcaggccatggtccttttatgagtctgaagagccaaaatgaagacctcactttctagtatccccaatcttcctcccacctttccctggctcttgagggttctttgggcatgttcccctctggtctccattattatatagggaagagaaattttccagaagaatatttgaaggattaaagtttgaggttgtagaatatgtgaaaacacacacacaccacaccacaccccaaaatcacccttttaaagaagattaaaaaaccaccagtgcctgtcctacattggtaaactctggcaagcctcataatgttgactttactgacctgcctgacttcagtggccgagtctacatggggtgttaaggccccacgtgtttttgcctgtgccctttaattgtatcttcaggaccatattttcagaaccagaaatcacagccacagtttggcagtggcacagaatggttcaatttaggcctatcccagagaggcttgggttgtctgtgaagttctgggtggtctgtattgtggagaggtgaacaccgtattgctgggggtgtggaggggggatgttgctgtttccctgctacagaaaggccaggcttccttttcagccttttgttccccgattcccctctcttcctccactacactcagccctgctgctgcttccaagggacaactccctctcttgtccttgcccatctttgagagaggcggtgaataaacaccaaggcaagaagaagcaacgggacccctagaaggagatgagtgtgtggcccaaggatggtggagcattgtcctgaaaggtagaaccaagactatagcctccgaggctctgtttaccatattcttggctcttgtgccacttctgtgtccagcagctggagcttgtagaagaaagatgggaaagacatagtacaggaaatgttcccattcagccagcactgatttatctgctgcctggtttctcaggaggcctaatctgtaagaacagtcgagaactttatttctgccctttaacctatgtccattttctagatagtttctaaaaaaggcatcacaccagctctttgagacaacatgtcatatgcaactgttggttttgggtggaatgaaactgaattgtcaacggacattttttctttctgtattcatgtgtttggaatagtgacaacgtcattggttcagactttgagcccccttctggttaggctcttcagtataagcccttaaaaatatttttgacttttcagggccaggcgcggtggctcacgcctgtaatcccagcactttgggaggccgaggcaggtggatcacgaggtcaggagatcgagaccatcctggctaacacggtgaaagcccgtctctactaaaaatacaaaaaattagccaggtgtggtggcgggcgcctgtagtcccagctactcgagaggctgaggctggagaatggcgtgaacccggaggcagagtttgcagtgagctgaggttgtgccactgcactccagcctgggagacagagcaagactccgtctcaaaaaaataaaaaataaaaaacattaaaaaattgactttttgagtaaaacaaaaaccaaacgagtccgtgtaaagtctaagatgttggttcatctcaacattgggatattggaataggccactttggaaggtttctctaattgatgaagggcatgggccaccccatggattgcaatgctgtggctgtttgggtggcatccagcttctaggggatggtggcaaacttgggtgtgcaggcagtaggaaggaggaggtagcttccagagagagccattgctggggctcaagaagtttctttctgggctcaagcatggttgctagtggtccacacagtgctttcgtgtgaattagaaaaagcacccttgttgtggatggatgtggctcttaactagggtctatcccacagtgagctggttggggctggatctcaaacctctttgcccctcaatcagaggcaggaggtccctggcccaaggggcttccatggttggagtggtcgtcagccgaaagctgttctggtgagatgttttgagctatcagttccaagtttccaaaggccaaggcctctgggatcagtttcactgatccttcaaccagcttatgtgccctgttagcccagatacccctccagagtgcttcgcactgggctgcaggtcactgtggccccacaccatagaagctgggggcctgtctgcatgttctggcatccataaagctgcctgcaaacgtgagagggggtttatggcacccttttagcatgactgtctcttgtgaccaaggccaagaaaaatagcacaaagatgtaggagtggtgaggaatgaagatgcacgtgcacgcgccctgcagtctcagtcaatgcgctctttagggtttagtttggaaaaccacagtgtcgtgtcttatgtaaccaatttcttttcttttcttttcttttctttttttttttttttttttgtgatggagtctcgtgtcttgctctgtcacccaggctggagtgcagtggctcgatctcggctcactgcaacctccgcctcccaggttcaagcgactatcctgcctcagcctcctgagtagctgggactacaggcgcccgccaccacgcccagctaattttttgtgtatttagtagagacggggtttcaccgtgttagccaggatggtcacaatctcctgacctcgtggtccgcccgccttggcctcccacagtgctgggattacaggcgtgagccaccacgcccggccaccaatttcttatacataggttatggagcagggagaaagagacatgcaaacaaggcagaattgggacctttgcaagaagaccttcttcactcgcccactttctcatacttttagtcaccaaggcagggtctttttaaacaacttcgaggctcaggcctagggggttaggagagtaaaccctaaatccctttcaccctagcatgcttgggtgccgtgttgacaaggtctctgaagtgcccatgggaagcagaccaggctctgagaataatttccatggaattaattattgttcttactccaatagatttgaaatctatttaacttttcagggtcccctagctttttaaatgtttcaagtgtattctctctgataggttgccttttctctccctgtaggctataattagtgtcctttacacaaaattggcttagaattggatttagagaagataagaatcaaattaccagtatttatcttgtaaattccaaaagatctacttaagacactgtattaaaaaaggagtataaaagaaaagtttattctatgaaaaagtaaattcctcatggtctgagcaaccaggggtattttaatatcaaatctccagacttcccttggaggcacctaaaattgccttttcccttgtcgctcgtttttatctccagttgagcttctgaaatatgttgccaggctttggatattggagagctggtgtggtttcagctttcattaaaattcggaggttttgacttatctattatttctgatttgtggtaagacataagcctctaaaatatgctatcttaaagagatacacacaaattttatcttagcatgttaagtttttaagccgttgagagatggcagaatagacctctgtggtctcctgtgtgcttcttcgtcctaaaatgtcagcatgctggttttcatgtgctgcctcgtacagtaagtccccagcagatttaaataaggttgtgtcaaaacatatgcctatgttttttttaacatcgttgtctcataagtgtgcagtaatggcatattgagactgttcatagactggtcagctgcatttcctgcagccgaggaaccctttattaaggtgcatttctggggttgaactaaaactgctcacccccatcaaatgaggaaacttgaggggtttgcagcccagcattttacgggcacttttgcgactgtgtacccttgcgtggcttcccgcttcagcgacattgttgacttcagttttctaatctaattctttttttcttttttggttttgatgagagtgttggataccaaagcacaaacgatggattccttttgaaagaacaaaaacatattttgtgagcagttttacttctgggagtgttatgtgtatacacacacacacacacaccctaaataattgaaagcaggaacttgaacagatatttgcacacccatgttcatagcagcattagccaaaatagccaaaaggtggaaataattcaaatgttcattgacccatggataaattgacaaaatgtggtatatacatatagtggaatattattcagccttaacaaggaaggaaattctgacacatggtacaacacagattaactttgagggcattatactaggtgaaataagctagatagcaaaggacagatagtgtatggtgccatctatatgaggcatctgtgcttatataaagcaaatttgtagaaacacgaactagaatagatgttgccaggagctggggagagaggggaatggggagttaaggttgagtgggtacagagtttcagttgggggagatgaaaaagttctgtggctggatggtagtaatggttacacaacatcaggagtgtactaaatgacactgatctgtacacttagaatctttaaaatggtaaattttagttacatagttttactacaataaaaatgtattttatgttaattgcaatacttggcatttgagaaaaaattcttagaaaatactgagaatatcatactgataaaaaccctctgctaaattttttttaaaaaaaacacacatcgcctgtactcctgagtatcagcgatcagtctagcgttgccctttaactatcattattgttattgttaaagtgatttttattaagtgctatctctcaagtggtatgattacttgttgaggtcttgtgttggtatttgtcatgtgattctagaaaaatctccccctttttggctctgagacattctctagttgacctcttcccagagagaagttaaggaaaatcttccgctctgatttttttttctttctgcacttaaataattaaataatatctgtggccttacaacacagggaggtttcagtgaggaagaaaattcaactgcatttgcaaaatgtctgaaaattatgggagagatgtttctgcttttagacttggtacgtatgtggtcaggttttcagaggttttctattcaccatctgtgacgggccttgtctcctcctgcaactggtggcagatgtagccagagattttgtgagcttctcaacagcatctttttcctgctcttcttcccttcctctttgtttggtttttattcacatgaaaatttaaagacccataaggaaattcaaagtgaaaatctatgcccaaataagtcaggatctcaagatgaaaatataagttctggaaatggaagtttcctctgcccccgtggtggtatcatagccagcagcctcgttctgtgcttttgaaggtttaatggcctgcatgtgaaggtaggggcgcactatatatatagtaccaggcgtgtgggcgcactggcacggatctgaaaaagcgtaagtttggcatttctaggtttattttaaacttacaacctttaacgccagacacagagcttctttcccacttaatgtaactatacattgattgcttttaattagtgttggatcttttttggtgttttgcagcttgggatatataaaaagtctgacttaaatttaaaaaaaaaaaaagctaactcctgacattctcacgagtcttgcaaaaaccagcacgggagccttagaaattctaacctcctcgtcctctttatttttatcttgagtcaggtgggccaagaagcaagggaagagtccaatataacatacttaatggatggaggtaatttccttggactgttttggcagaaattaagcatctgtatttagataaaggtagtggtgggttggattttcatagcataagcatagttgctgaagatcaataatatcaaataatgggttcttggtgagggggaaaggaaatgggggaggggtcttttcactcaacagtttggaaatgctaatgattatttgtggttttcagcccagaattcttcatatttgcttgcaagcttctatggcactgccgaattctacagtaaatatttcggacatcctcagccctgttctcctttcccttcagtaaattacatattaaagtagcctggtaactgagcactggttgctgtgagataagggctgggaaatcaatatgtttgccatgtggctgcttgtttatgacacctgcctctagaacagttgagcaatgttctgtttgttaaagctgcatttcagaagcttgtatcctcctaaaacaaccgtgatcttactgggggagagagaggtgctacaacagatattgattttagtttttctaagtatggaattacacttctaaacagtggtcttacagcctgtgattttttccccatgaggaggagatgtagatactctgaatatatatatacacatacacacatatataaaataaatctattttataatgtttatgatgtggtcagttaaaaaaggagtgtagtttataataaggaagtgtaggtattatttagatttatctcctctcttggcacctggcttaaaaaaaaaaaaagtagtaacaagaaacatagcagctgctgggaaacatgcattttaatctaagtctccagtgtggttttagtttaaccagtggatgatactgtagtctcaaggcttagcctgctggtgagtcaatggttcttaaagctgtgtggtgtcagctcaagtgagcgaagcagtgtgtggtgtgtgtgcattggagggtgaggggtatgaggaggtagtcagccttggagggagaagggagacaggctaggtcttcttcacgtggccttccattttggaaaacagaagcgatgatacaacttctcttcttgcccaagggattcagtagaaaaaaatacatttccaaacacattgcgctacagtcattgaacttcaaagtgtaaagcatggattgtgttggtgcacttgtgggtgcccatgacacacactcttcaatgctcctgtgccttcctaagaggtgtctgtctttctcaaccccagtgtgtgtcctctgacgtctagtggattgctgcatacacagtcaaccctccttaaaaggtttaaaaagaaacatgagctcccttttagagcaccccaaagcagctgcattcttgagttggtgccctgcactgggattcccatggactgggaacatgatctcttaatgacactaatatattctgagatctgattttttgtttgtgtgttttttaacccaggttggcaggttctccttaatcagtagtggcaaaatgtctctttcctttctccacgtaatgctaaatggcttatccagtcatctctctctgctcatggtcagcccgaggtgacagttaaaattggatggaggtagcttggggtaggaagacttggtgattttggcggcactgggtcaaacccagggaaactgaagctgtgtctgcacagctggttgaaaggctgtgttgtgatccagggatttaagtaaaaatattctttccttaccaccctctatgccccctactccccagtaatatagtaggcatgggggttgacttattttgaggggactagtatgtatttaatatttcatctaatttttgtagccctggcctggctggatgacaaaagtgtttaaactaagaccgatttgagcaagtattttatcctccctctcgggagactatgggcatagaacggtgtggggatttggaggtgctggcaagtctggcccctttcctcttgcgtttactcaggcacagatggaaaaagatgaaactcaatgaggacccttttgtgagatgcggcacatttcgctttgtggaattattaaccttttataagactgggatacttacaaacttaccgcaggaccagacagtgactatcagaatcctctcttctaaagatcagcgatctacagctttcgcaaaacttaaggctgacttgggaatctagacagcccctagtatggtgagtgaccctagagtggtttttaatgaggagatactcacgggagccagcatctcgggggtccccggggggttcatggccaggagcgttgcaagctggtttgtttgtttgtttgttttgagacagggtcttactctgttgctcaggctggagtgcagtggcataatctcggctcactgcaaccttgcttgctctccctggctcaagcaattctcccacattagcctcccaagtagctgggattacaggtgtatgccaccacagcctgctaatttttaagttttttgtagagatgaggtttcactgcattgcctaggctgatcttgaactcctgggctcaaacaatcttccctccttgtcctcttaaagtgctgggattacaggtgtgagccacagcgcgaggccttgtttggtgtttttgtttgtttgtttgtttgttttatggatcattacctataaagtaatttagaatacccactcatttatgatccagccttccctgcattttctagcgttgaggtcctttggggccatagaagtatgtttttccaagactgattgcttcgtgtatttaaccaggttttttgtgaagggtttgatataaactgagtgactgaagagaggaacatggtgtgatttggtagaaagatctgtaattttggagtcaagactggcctagatggacagcttggccacttttaaaattttgtgtccttagccccataaacattttgagattcagttttctctcctgtgaattggggacgatattgcctaacttgtaaggttcttgcaaagatcaaatgaaaaaatacacatagatctcctggctattattggagtgcccagtaaatgctagttgccttatcctccattttctttttgagagctgaagacctgattttatttccttgcatttttcatgtcattgcctatagggagatacattcatatatttgttgctcatttttgtatgtgttacagtggtgataaagaaactgatggtatcccagatggggaggggcaggtaaggttttatcagtggcttttaatttctttatgaaattggatgtggctctagggaatagatgtctctgggatggtcatgttttcccttgccttttggctcctgcaatgaggacctctttctgttggtgtgggtcttgtctgagcatgccagggatggcagtgaacacatcgatggtggttgggacgtcctcattcccagacctctgggacatactaattcccagacctctgaaacatgggtctcagctgctttgccctgcagacttgttctcagtagctatttacctttaggagaaaaaaaaaatccttaaccaaatgctttaggaaggctttcttatcgtggctgtaaggtgctggtgggttgttggcagccaagtttgggtttaaatctcactgggggttgaggctgctgaactgctattcctaacatgctcttgtgtttttatgcatagaccgtcttctggatccttggtgagttttttttactctggggttttcaggagaaaggtttgtcattcatcatcactcttctccttcatcacagcagtggtaacagtggttagagggaggaggtagaatcagttgttcaagttcttttttcttccaggtaagtcccccccaccccccggctgcccctgcccttccgcattttctgggaagtgaatctattgggaaatgcatgggcctgtgtttctgggatgattttagcatatgtagtaagaggggtgctttttgctgatagcccaggcgttggtcctgtaatcctgaggtgtggtttaataagagctgaacagtcatttaattatttattgggtgcctggagaattttataggcaggagagcctagagctattccagaaaaaaggccaatcctagagctttttgtgtggctttcttcttgggcttgaagtttttgatgctcgccaacattcatagtagcccccaatgccacccacacattgggaagggacaatagagccagctaaagctctttctttgtgtgtgcccatattaacccatctagtcaaatgtgggtacccttccaaaccattatgtcttgttcctctcggctgctgggaacattaaaagaaccttatttgaaggcaaacattactgtatcagtgatgctgaaactggaggtctgtcaatggcacttcattgcattgataattgtttctgctttgaaccacaacactgtgattattgaggttcgactgtaagggctgagggagccttgaggccattgaaagcattctcctgcctttaggccaggcctatgttataagtgagagacaggtgtggagtgtgcagggagggaattaagatagatggtgacctggaattcagaaggtggacccccaccaccccccagcctgagaccaaagcacagtttaactctgtcatgggtcatgtgcagagggaagggactgccccagaattagcagttggttgaacaccctgcttaaaaactttttcttttcctttttttgtgagtaccggtccgcttggactaaagaagttttggtcgttgttttcttaattttgggctacagagtctctacctacatttgtgttttgtgttttggtaaccacatgtaacagccggtggaatcttttttctctttgctttctctgaactttccaaagagtaggcccctatctctcgggggattaactcctcgtggcccctgggtcgttggtgctcccccaccctgtgtcagcatctaaacctctgcacacaggatgttttctctagcgcttatcagatgctttagaagatgcggggtggagatagaggtaacgtttaacccatcctggattcctttcatgaactcagccacagagcagagggaggcttggctggagcaaacaatgttgggccttctatttcaaacagaggtgtgggggcttgtggtggcatcagtggtgcactgaacaaccctccctgaccctagcgtgtgggtttggagcctggggaatcaaagagaaatctaacaaactattctttttcacgtgtgggctgaatgaatgtgtgggttatccacatcagtttcttctctcttctcatcctccctccttcctcgcagaccagcattttggccagggtgcccagtttgagctcatttaccaaaggtgaatagggaagggagtagaaaccaaattaggcacctgtctgacaacacaaggatcttttctacaatggtgcatttggattatgcagagttttagattttctgttttatcccagggtgaacgtgtgtagaaaactgggacctaaccatgttcttctcttcagtcttatggtcattgctactttgaaggcagaaaggataaaagtagcatagggagtggtttaccataactgcaagtaaataccaagcatgtgcgagcctgtagacattgcctgctattggggaaagacggagttagctggggaaatacatcagtcttcactcccagcacccaagatgtaaacatttcttactcttcctggatcaggctatctctgctttgccttttctttcacctacctccttctttcatggcaggaagggaaaggaaagtacccccaagcagccagcagtcagcactggggcctctagggaagagtggattggtgttgttttgctgtggtttgctgtgcgttttccagaatctctcttggatgactatcagattcagtgaagggatggaccttcaggaagctgagagataggagatcctgtggcctgggaacccagaggcctgggccctgggaacaactcaccacaggactcagcctgcgaaataggaaacgtcattgtagcttctgcatcatgttttccatgttccactggaaaaccatctgttaaatggacatagaccaattcttgcttttcttctttctggtaccaaagagaacggtggtgtctcttgtcatctagatgttcttgtaggggcaccagagtcattgcaaccattttgagtaaagattgagtccactggggcatcagaaggggagtgtgtcattgctgttgttaccacacaggccgtggtacttgccttttcctgacccattttgcagagcaggccagctacttaacccctcgccacccactcacctgtggaaggcacatttgcaaaacaatagaccagttggtaatttggcacttgttaggtagacatagtggtacattgaggaagttcctcctgttaactaacctagtttttcttgctgtaatccgaatatacttctctgattttttgaaaaagcctgtgagtggagcctggctcgacagcccaaaacgctgaattaattctgtctctctctctctctcttttttttttttgagacgtggagtctcgctctgtcacccaggctggaatgcgctggcacgatctcggctcactgcaacttccacctcctgggtccaagcaattctcctgcctcagcctcccaagtagctgggactacaggcattgccactacgcccagctaatttttgtatttttaatagagacggggtttcgccgtgttggccaggctggtctcaaactcctgatctcaggtgatccaccagccttggcatcccaaaatgctgggactgcaggaatgagccaccgcgcccgacccaattctcttgagtgacatgctgagtggggctgctttttggtggaggtaacaaaaaaagagttgaggtattgattttagtttcatttgagacagcgatctgtcccctccctgagttccctcgtttgtttgtaaactgcttaaatgaactttttcccctgttcctccatcactctgctgttctcttctcctcctcttatcctaacagtctcataggtaaacttagaaggaagacaaatacttacaaattgtcaccgagggtaccataaaagagacatttggacagtagttctggggagatccttgtctttgcttcatgttaatacagagggattggggtagcccagatcaccaggggaaagtggtttttcttcatttagcttttaattgctttctttcacttttatgtataaaagattgtccatttaattaactcaagaatgcaatttcaaaaacactaatgctttacacatgacggcttttaaaataaaagtagcattctaatattgcataatgcttttctatccccttcctctccccgcgttcacccccacccctccagactgtattaacctttcatagcggagggttgttaggaggaaaacgctgttctggatggtgcctctctgcctctccttcccaccaaccaagtacagcagcacgacagccgcaggcctttctgaagtgttccgtagcttctgtaagaaagagactactcatcccttcccccttggccggtttcatgcctatatttaccctcttttgggggtcactgtggctcctactcccattgctgccttttaagaagcatcattatgatggattacatgggaaaattaaaaagaaaataaaaccccaacatttagctctggtttcttttgaataatttcattagaagaaacttgtatacattggtctatgatttcacgatcttcttttttttttttttttgagacagagtcttgctctggcacccaggcttgaatgcagtggcacgatctcagctcactgcagtctccacctcctgggttcaagcgattctcctgcctcagcctcccaagtagctgggactataggcctgcaccaccatgcctggctaatttttaaaatttttttagtagagttggggattcaccatgttggccaggctgatcttaaactcctgacctcaagtgatcctcccacctcagccgcccaaagtgccggggttacaggcatgagccactgtgcctgtcccatcttctcttttctgatggaaaagaaatctggctctttttcattcctttttatcctgcttccaaaatgttgtgacttccctatggcattggtctttcttattttgtaatggaagttcccctgattccagaattttccctttataccagctctcatagcccagtccctgctagatgggctttttatttttgaaagcacagtagtttcgacgagttttattttcaacagttagacttgggaaggggcaggatgcagatggagataaatgcacatacatatagatgcccctgagaaagacagctctggaacctgctagagtgatcccagccacgaggcgccagggccctggtgatcgctctgattttctaggtgagataagggaatggaatcacagagggatcagtgacttgcgcaaggtcacgctgtcaacaagggtcatagccagaatgagatccacttcctaggtgcatgggaggtataagcctcacctgccttgaagcctgcttgtgttttgtttctgatgatatccagaaaagaactttttagaccttgtaatgtgcattataaaacacttcgcatttagatctaacttcactccctcaagtctcagattaagactgtgttcttgtgttccgtcctccccagtgatgaaatgcttggttgtctagagtgaacaaatccaacaactctgccaaggggttctctgtgcaggtcacttttcaaagggatcttttctcccttggtgtctctcctccaaagagcatgatttctgagcctaccaaagtgattactgtgctaaaatttccaccctagaagaactattgtgtagctgtgagaagcgactaaaagattattttcttttcccagggtgggtgcgcaacattgactttttctcaatgtgtgatgtggagatatatgcatcttgggaggagatgcataatatgtgtctgattctataatatgttggtaaaaatgaccttggtgatgaataattttcaaagagaaacaaagctgggctgagaagagtggagcttggattggagatgatgtgcagtctacattttttgttttctgttttatttgaggagagagattttcaaattaatttggagtgaacagaaaatacagtggaaatttgggacttttttttttttaaagcctgtgttccttatagtgggatcccattttcacctcctctcctcccacctttattatgatgattattatcattattattattagtttgtactcaggaagcattgtaaaagatgctgggagggtttgaatgctgcttgtgagaggaaaggatgaggagaccatacggctttatcattcattaattcctgggttcattcattgagctatttaaacttctgtgtgtaagacggcagccccagatggtcttttggtgcctgcattagctctgagaccccaggcccggacaaaagagggtgcacagagcagctgagtgtgcagaatgtttccagccgttagaaagctgctcccgagtctttcagctcaggagctagaacacctatcatctccagcatctagagaatcccttttcaggtctttttcctttctaaaaggctcagtgcgaatctgtgagccagcttctattactgcagcagtagtcacagtatctaatttttagagtgaaattgatggccacgggcttatttgcaggtcttcttagtaattgctctctgtcttcttgttctggaaggagttctgttaacactggtgaaaactttgagctcatctcccttcttccccctccacattccccttccctgctcaactctctaaaagacctgcagctattaagaaatttccagtctgggctgatgaggctagatgggggtggctgcctgggttgaacacctaccgtctgcccgcctctgaatgcagcgatggtacacacagccccattcagtccctgcaacaggcctctggcatcctggcattaccgatgagaaacttcagctttacagagaagttcaaagaggttagatgttcagctcatgcttttaaggtcggtagctggaaatcaaatgcaggttttcccgattgcttggcctgagctcttaatgccttcttggatttctttgtggctattgggacaggctggcctcagtgttgatgggcaggtaagggtacccagccagtcctagcttcactaagttgccgctctgcctacctcctgcgtgtgcttccctagtggggctgtcccacttttggagtggggacggggctgatctgtgtcctaatccataacaggcctaatggagctgagacctggcactgcaggagcggaggctttggggtcagtcaggtggaagaaggagaggagcatggggcatgccccatcctccagatgtctgttcttctagtggacttcactttggcctttcagtagctctccatctgaatgtggcagttgtctcaggaattttgtcctagcattatctgactttattgctcttatagaaaatgctggttccccagaaataatagctggtctgtggtgagtgaggttgggtcattgtgccttgaggtgtgacatcttctttggcttagtcaggtctttggcttgactacaaatgtctgcgccttttcctcacatctcagattcttgcagccaggctctgtccgccatgccctgttgctccttactgttggagagacctggaggttggtggagttctccaaggctggagttggggtacacaatgaggccgagatgttttgcatagttccttccattgccccgatcaggaatgtgttcccgcaggatgggttatggcctggaagtgagcctaatgtaaacatccttgcagaggccatcctcttaatcaaatagaaatggtttgagggatgagcaacttgggggtgggggagataggaaaggaagagttgggggaggggagagatttagggattgaactcagagagagctgtctgggggccatccttccagcagtcctgacagaaaactggcttcatggagttggtgcagtgcaaactggaatgattctcttagggaacttggttctctcagacagtgtggtatgttgagggaaaggaaggaaatcatggtttggctgaacagctgggcagagcagcaagggaaactgaagtatgttagaagagcaggaccggaggatagagcagacgggggccacaggaggacttctggaaggagcccacaattcaactcctttgagggccttcaacatctatttaacgttgtaacattttgaaattctattttgaggggactagactctcagagaaggggcgtgaagaatgtgggggacttaggtgcaaatgtgtgtgctggggggcggtatttagggctcttggtggagcccctcatgtcatggagaagcgaaccctttccactgtgcccccacccccttttcctagccctatgaagggctcagactttcttggagatgtggagcatttcagccagaccctacggtcaaagatcagtcacagagcagtcttctgtggcaacctgtgcacagtcccccaaggcagcaatctggggtcaccagggaagttactgttactaatctgacctgggaagttttctttttcgtaggggaatctagaaatactccagggaaagccacggccaagcctttgcccagccagtaaacttttagggcttttgcgtgaggttggtttagaagaatttgccgatgccaaggctgctatgttggtttcactgatgcagatttaaagaaggagggccagtgagacctcgggaataggaaggcagaggaaacctttctattctgatgtcttcaagtcttggtgcttgaatgtgccaaggagagtgaggatgtaaataatttagtttgccttcaggatgcaggatctaatctaaacatgattaagctgatttgattttatagattggaatttataagtgatagaaactgatgaggttaatgtgaaatatttacgtaataaaaagcttcattacctgatgctgaagggtagagggagaaaatattcttggcaacatgtttaatcttttggaaatgaagttgggttaaagttttctttgtaaaaactgaattctgtgatcttgtttttacacatgctgtgcttaaatattaacaccaattgagcaaattgccttttaactgcctttatttgctttcattaacagtataatttaaaagctcaagaatttgcatggaacctgttgtgcatgttggggggaaaactattcataaattaattaatcgtgagaacattatctttaaggaaggtcacaaaacatgagcatgatttccaaaaagcagtgacatgtttttgccgtttcttggggacgtgatgtacttttggcttagagatctgtgctgcgtgtgtgtgtgtgtgtgtgtgtgtgtgtgtgtgtgcacgcgcgagataacttggctggatcaagaaaaattttaatgactgggcatgttttaagttaagttgagtgaacctaattacactgtagtttccagagagctaaaggcaataataccattggtatttaagcactagtttgaaaattaaagccaacctatataattggctgtgctccttagatggtttatttctttcttccctccatttctgaaatcccccttttctttctctttcacatttaaaccaatagagagaaagagagaaactgcctagcgctgcgaaccacaagacggtccttccagtggggaacattaactgcattgtcctctcatgaaatgacgctaaataatgttaaaggtttccagtatgatttcactgaaattggttgcttccttctgtacagatgtttttgtggtttagaacctcagccaaggcaaacattatgaatgagatgcagagaccaccatgtcctatgaagggctgagagttcctttgggagttattttacttgtgattctgacacctctgttttgacaaagcttcattctttcagtctcttctttccgtctccctctcctggtgctattggtttgttgtgggtggttttcctaattaagttaatctgcaacctagtttttctgggtccacagatgccagaatgctgaatttatttatcttgaatgtttttgttggctactgttgagacacattcttcctcttccccttttaccccaagtctgttttaaacattttttttttgaggcttccagacgcacttcaataaagaaagaatttctctctggtgtccatttgtcaatttttttgtgggggatgtatattgtaaataatataatagatatgtaaaaggttgtaaataaaacccaaaggttatagaggaaaagatgtgtaaatttgactacatcaaaaatttaaaactttttgcatgattttctttcggatttttgccttttccttgcacatttgttggttctctttcgatataaatcagaaaaatgaatcttttatctgtcaaatgcatggcaaagattcttcccagtctatcatttgtcctacagttttgattatggttcctttcatcacagaacatttctattatttatttaactaaaaaatgtcacaatgatgtctgtagcgtagattttataaagcatctgatggtcatattttataatctaaattttggaaaagtatttggataatgagagatggagaaggtagagggagagcaagggagggatagagagggcacgaagatgaggaagggagggatgaggaagaggagaaagactggtgagaatgaatgatgttaaaagattgatttttcttcctgtaaaaaagttggctgtcgtcaaaacaccccttctgtctaagggaaatattgtccttttggcatgtacttgaaccataaagatttctctacttgaggagacctttcctaagagttacctgtccagaaggcagtcctactgttctctctcatagctctacccagtctttaagacctagttgaaatgtaggctccataaagccatttctattttcacacagttcattttctttttttttttttttttaagacagggtctcgcactatcacccaggctggagtgcagtggcctgattatatagctcactgtagcctcgaccttccaggcacaagtgatcctccctcctcagtttcccaagtagctgtgactacagggaatgcactaccatacctaggtttttaaattttttaaaattttttcttagagatgggatctcactgcattgcccaggctgatcatgaccacctgggcgctcaagccattctcccgcttaggccttctaaaatgccgggattacatgcatgagccgctgcacccagcccacacacttcatttttattctcaaggtacctgctgctttctggcttatggaagatacatctctgcatgtctaatctttcttagagtgtcatgtgatagcagagatgctgtcttctgtctcactcgtctttgaattctatactgtctttagcggtgtataacaaccatttataagtacataagtgatttaccagacaggtcaattcttatccattctttcctcctatacgttcttctgggacattcttcaaaagagatatttggggtcttgaagtccaacacttcgggtatttggcataaattaggttgaggaaactggttggaattttgggaagaatgaaggggagagaaccaaggaagaaggaattccagagctggtagcgttgatttcagagtattctcaatctaaaaaccctgtaatcatgacctattcccaaaggtgagttcatggcagcttattcaacagatatttattgagtacctgacaagtgttttgctttgagtgaggcactgtagggcaagtaggagtaagtaaagatctttgcccttctgaagctgttctccagtttgggatttagaaaatttgttcaggaagagggcttaaaaaatagagacattctgtaaatgacctttctttgaaatcccttattctactttgactactgctgtctattcctcttcctaaatgaagctggtggaggctttttcaaaatcaattctatggaggttattggggcagatataagttagtcatctaatcatccagttagtcctgaactgaaacctggaattcattcttttacttttatattcatttattcaattagtcaacacaaagttgcacaatcaatattagctaaattagccaagtttaaatccatggtaaggcgaaactcccacttcttttctattagaaagctgatttcttagtggcagtaatgggtggtagggataaaaactcatcccatggctgtcttagaaccttcaggtgattcagtagaaatagtgctgtttctatctccatgatttattttcgggaaataagtagagatactggggtccagaataacttgatattctagttgacaatgatttctggagaacatgtccctgagacttcgtccatgtcggccacaatgttggggagcagtgaatgtctgttgaaagacagaataatggatgaagtccaaaggtaggaaatttacaagcgatgttactttgggatgacggggatgggagggaaacctgactggggagggaccaccgggcttcagtgtatatgagcagtttgctatcatttgttagaccttttgagcatctgaagtatttaaacagtttcttgttattctcctacttggttgatctttatctttgctgctgagttccaggcttagctcaatagagggaacagggagatgactgaaggcatagtgtttgtaaaaagagtttgtttcagttcttatcaaaaagctctttccaggaacagaacatacttttcattatatgggatggaaatcaggatggaagtaaatatgttctctagaatgttctagctctgagttgatttgcatagaggtcctacagatcattctatgctatatgttttttctttttttttttttttgaggcagggtctcgctctgtcacccaggctagagtgcagtggtacaatcttggctcactgcaacctctgcctgccaggctcaagcgatcctcctatgtcagcctcccgagtagctgggactgcaaggtgtgcactaccatgcccagctaatttttgtatattttttgtagagacagggtttcgccatgttgcccaggctggtctcgaactcctgagttcaagtgatcctcccgcctcggcctcccaaagtgctgggattacaggtgtgagccactgtgcctggcccaggtcgttccatgctgatgggctacaggggcacagaaataaagatctcagggcactcattattttctttcttcctttcttcttttgttaagagggaggtaggagagggttgtgtaaggatggaatattgctgcaaacctgtatacttctttaatttctctaccctcgcctgagacactggagccttttactaccatctttgggaaagaccttctagagaaaagaacctttgcttttataggtgagcagggacggtgtatgtcctccagcatagtttaaagtgtttggtctgttgcctctccagaggtcaaaggtgagacagactttttgttggtgttgttttcctccctccttcctcctttttttttttttttttttaaactccctttccttgttatctgaacttccaaacatcagctttgatgtctattgttgggacttcaagaggactcttaacacatcggcaggtgttggttttagtgagcaggcgagagtcccacattcttccaaggagagagatgggtcccaccacattcctacccctagagcagaagttcccgcgctgtgcctcttctctggctgcttgctgaggacgtctcccagtggggtactgggtgtacaccagctttccttcccgtctttctgaagcctgtctgaagggatctgtcttctttcagagcagctgaagagaggttgtctaacagccacgtattaaggtttcattaatcaaagacacttccactgcccctttacagaaacacaactgctgtggctgtcctccgctgacggcccgctaatttgtctttcccagaggaggggaggggagaaggacagagaggcaggcgctgcccctaccctgcagtagggatctccatactggctcccagcgagcatgcgttcatgtgctaactttaggggactgtgcccggggcttcacattttcgtgcagagccatgggcagctggctataccccctccccaccctgtccatgaagcagggaatcaaaaccactggaagcaattactgcagatagataggtttaggttgtcttttatttgcaagaaaattttcatttcaagcttcaaggttttcactcccagcttcaaggtttgctgaaattgggggcagaaagctctagaagaaataagaatatgggtacatgtgtttaagtgtgcttaatggacagcctcggcgaagtgaggggtgatggggacattaatagctggggagccactgacctgaaatggtacagtcttcctgtagttactgacggatgaaatcatgactttatgaaattttaatccttgggtatagaggcacaactgactttattactggaccccaggtgtgtgtgtctgaaatgagtgttttgaatctaactgcatatttgattactttctaaaatttaggcgttgctgaacttctcctcatgcttaggttggaatctgaccttctgtaaccctcagctcagaagatggatatttgggcatttgaaaacctctcagggcctcctaagtaggtgattgagcattgcgtcattgcatcgttgtcttctttttttaaagctaggtcctgtccactggggagcagctttgaactcactttattcaactcatcaaatatttactgaatacctactagatgtgtttggctctgttggagaagtaatggtgaggcgtaatgcgttcctagctcttaatttggggttagaactagtacacacatggctgtaatgaaagatagaataaaacatgttccctaagacaattggtaaatgcagtgaaagctccaagcggggaatgatcacatctgacttatttattcaatgagtgtttattgagtcctactgtataccagacaatggagatacagaagtccagaaacttgaccctcgtccccaagaatctaataagctggtaggggaggcagacactgagacatagcagcactttatagtagaatacaagtggtaataaaatgtagaacaaagtgtagaggaaatggaggtgaagcagcaattgactaggttttgggaggggctatagataaggctttgctgagaaggtgacttgtaagcaagatcttaaaagatgagaggaagatcactggttagaccagagggaaaggcattccaggtagaggtaacagcacacgcaaaggccgggggaaggagggagagagagctgcaggccatttggtttcaccagagcttgagatgtataaagaggttggtagagatagtagctggaggtatggttgtgagcctatcatgaagtcttgcttgtgcagcagagagagaagccgaccttttattctgtaatttgggagaaggtgttgaaaggttttaatcccgggagtgaaataataggaattatgacttggagcaccccgagcacagcattggggatggatatgtgggagtcagaggaaccacctaggagcccgtcaagtggtctaggtgagagagaacaagcagaggtagggaagtagcaaaggaggtggagagggaagggcacattgtagggggaaatgaacaggtcatgttgattgggggtgaagtttgaggaaggagttggttaagactcctgaggttttggcttggataactggtggatggtgggaatagagaaggagttctgggtggaaaaccaaagtctctcttttggacatggagtttgaggaggtcttggaaaaactatatagaggtagtctgcaatatttgcagtgggtcttgaaggaaagatattttgataagcagaagttgtcagtatactaattcatttgcattcattgagttctgatgatattttagcatgaacaagaatgagaagtatcttaatttcctggcagaaaacagtatttttggagtcccttgaataatgtaaagtgttttcatcaaagaccttcattcatgtgtgtgctgacatctggagagcagagatagatattttccttaggtctgggttcgtgagctataaactcttcccttgctcctaattaatcctttgtagttactgactgacgaaatcatgactctgtgaaattttaatccttgggtgtagaggcacaactgacttaaacacaggaccccaggtgtgtgtgtctgaaatgagtgttttgaatctaactgcatatttgattactttctaaaatccacagggtctagagaaaacagattagaggtgtttttgatttttgttgctgttgttgagacagaggctcgctctgttgcccaggctggagtgcagtggtgcgatcctggctcaccgcaacctccacctcctgggttcaagttattctcctgcctcagcctcccaagtagctgggactataggcacctgacaccacacccagcaaatttttgtatttttagtagagacagggttttaccatgttggccagactggtctcaaactcctggcctcaagtgatctgcttgcctcacctcccaaagttctgggattacaggtgtgagccaccgtgcctggcccaggctagagttttgggaaggatttgtttatttatttatctgtttatctatttatttgttgggcagtcttggaaaggatttatttaatttatttacctatctatcagtcatcatgagtaattctcaaatatctattatggaatcttagcacttggggatcacacaatttgttatctttcctgaggacacttaggcctggggagatgaagtgactggaaccagggctttctgcttcatattgcatttctactctcacccctaggagaacaggtaaaagataatttgtgttgagtgaggggttatgaagagacaaatgtttttaataaaaggagggttgcgtctctgtgatgagacagagtgttctggctttcatggttttccctgtctgaaagtaacaagctctagattacaacagtgaggaatggaggatgcacagatggctcagacagtgacttggagttcaggttgacatttcaggttgacttttgttacaaagaatttagagggggccaggtgtggtggctcacacctgtaatcccagcactttgggaggctgaggcaggcggatcacctgaggtcaggagtttgagaccagcctggtcaacatggtgaaaccatgtctctactaaaaatacaaaaaattagctggatgtggtggtgggtgccttagtcccagatacctgagaggctgaggcaggagaatcgcttgaacctgagaggcagaggttgcagtgagccgaaaccacaccactccgctccagcccgggtgagagagtgaaactctgtctcaaaaaaaaaaaaaaaaaaaaaaaaaaaagaatttagggggcgttgttagggggtattgtatacgagtttgtgtgtgtgtgtgcgcgcgtgtgtgtgtgtgtttgtgtctgtgtgtgtgtgcacatgtgtgtacaggttcactctctaccactgctttcccctttgctgacctggactggcctgctggatttcccaccaggagctctctaatgcagtgtcgactgctattctcaatgaggcccagcactgtcctggtgaaactggaaagagaaagtacgacaggtgctgtgttttttgtatgggggttgtaggatcagagaagtttagagttggtgggacactcaaggatggatagaaaacttctgtttgggtctctgcagtgatggagcaatgtggattttaacaaccagagtagcagctctcatctcatgagcacctgtatcgtgtcagtctctgagttaggttctttaaaagacagagttttgttaatcctcacaattttgtggtattgttaaatcagagtacagatgataaatggaagctcagagtggttaagcgctttacctggtgtcacacagctagcaagcggtggagcgaggatcttgactaatactgcagcttttcccacttccatggcacgctgcctccttctagcattcagtgaggaaagctctcaccgctgggagttgttcactctagactgagcgcctttcttagagaagggatttcttggagaaagattgcagagtcttctctaatgattacaagaaggacagagtcctggtggacacagttggagggtcttgtctggaggcagtggaatgagccaggtggcctcttggagctttttcaggagggaaatctgtaagggagaggagatgggactctaccttcgatcacttggaaggcggttggctgaggccagagagtatctttccataccttcccaggagccaccccaaactcctcaggcctttgtttctgaggttctctcagaaccactccaggcagagcccacaacacatcctgatgttatgggatgaatggggacatggggcagggcagcagcctggaagcaagtgaggttaaagaccgccttagcgagttttcccttccaccagacttcccctggctccccctggctttgttcatcttgaactcccttcacctcttctactgtttcatccctttccttcagtccaccctggatctcatcctttaaagccgaatcctctttcctgaagaggaaagaaggaaatcctgactccttagatcactatcctgtgagatgaaagttgctcttctaatttgtcccattttcttcaactcttcttcccctctgtccctgctccacactcaccactggcaaccactgagtctgagaccctcccgcacactttctctgcgtgtcttcggatgctgtatttacttaagctgaatacagggtctaaagggtggcagtgtcacattagggcccatcgagggagcagagggcctttgtcagagtctgcaggttgtggggatggtgactggcctggagtcggggtgaagcaatgggaactgtagaagaaaggggaaggagagcagggcagcgtggatgctggacctgtctcctcttcagccttttggactctgtgttccctctcctgggaagccatacagccttggccgcttcaagatggtgcctccttgggcagcacctactctggagtcggtctgcatagttaaatggttggaaaaaagactggagagccaatcagggatgctcacttgcagttcgtgtgaatcctgcctgacccacgtttagagacaccatagaattgtacagaaccttaggtatcaaactgggtttttcagatcccactttcctggtgagaatattcttctgttgatgtgctaggaaatgtttaatccaggtgagaaacaccagactggtagtgtttgcgatttctgtggtgtagatactcccaccatggctaattccaagctgctggtgtggtcactgaaggcggagttgagaaaaggtgtacacagtggtgcaagccagctccagggcaccgtggcttctgaacgcaagtgtggaagcgctaggagtcctagttgctaggctctagagtggaagttgaatccttggtggggctgccagtaaggtggggaggtcattttctcaccaaatcaaaacacaaaaccctggctgtgtcgtctttcttattctcatgcctggttcttgattgtggctagcaccatggctatttcaggatcccactcatactgctgccattggttgaatgcttacatccattatctcatttagtcatgacagtaatcccatgacatagggactggtattatctccattttgcaggtgaggaaactgaggcacagagtgggtcagtaatttgcacagggttctacagcctttgagtggtagaactggaatttgaaatcatgactgtctgatcccagatcccaaatccttgcccagtatattatactcgcagttttgtagcttttcacagacatttccaaattctgagtctactctcaatgcagggtcttctagcataacctttgttcctgttggcaacacttcattttggactgtcaagatgcatttcctgagatgtgagatgtcatgaccctgtgtttggtaagtttggctgcaaggtactggctgtcctctaagacacttcctgagtcccaagtccacagattttactgaggactgaaatggctgcattcttcatagacactgagtttgcctgttccaaaaatggtgatttctatagcaaccatttattctagcagatgtgtgcctggtatggttggcagagagggtgggaccaaaaatggaaacggccttttattcttcacttcctgaatgcacgccctgtatgtgaggcatataggaggaaaaacatggcatccttagaatctgtaatagatctatggctcaggaaagaaatacgtgttgcttcagactgctttttatctggagcttgagttgggctgtgtttggtttgtggcgtgttctttggcagatgtacctgttggtttcaattcaatggatgtttgtcatttggtctctgcagaatatgcacatttactgtgggggtaggtggctaataaacagagagaagacactggcttggctcttaaagatcacgacgtctatgtaaatgtgtattacatagggctttttttggtggaaagtaaaataaccaatttatgccagcctaagttaaacaagaggatttaatatcataataaaggaaggttttatggagcccagggacaggagcatggccccatctttgaaaggcaagtgagcggaactaagaatgaactgttagaaacttaggtggaattctctctctctttctcatgcttgtttagtctttgcacgtatttccattttcacctctctgcagaccacagagtcgaaaaatgaccaccccaggactcccaggcttacatgtgaccaggcttgattcagctttccctgtgtgtatcccaaattctagaaagagacacagtctgtctgatgcagcttggatagttatccactcttggccaatcactcaccgaaggctttgtggtgagtgttatttatctaagtctgctcaggctatcataacaagatactacagactgggtggctcaaacaacagaaatttatttctcacagttctggaggctggaaaatccaagattaaagtggtagcagatttggtgtctggggagggctctttttctagcttgttgatggcctccttctcgccgagtcctcccagggtggagaaagagacagtgagctggtgtctcttcttacaaggacactattctgtcagatcagagacccacccttaggaccgcatttaaccttaattacttccttacgggttctgtctccaaataacagtcacattcgagatcagcgcttcaacatattaattgtagaggggcacaattcagtccatagtagtcatgtaggataacatggctgctgggatccactcttgggccttgggaatagaatggatctcattggctccccgagaaggagaccagtgcagatgaaaaggctgaataccctgccaagacaatgtcctgtgccagattagaatctaaacctcattgtcgaactcaaacacattgcacttggggtgaatagtcctgctgtgcgtgtgtgtatccatatacgagatgtgtgcatatatacacatatgtacaggcatatatatacatatatgtatgtatgcacatgtctgtctgtgtgtatgtaattagagaggactttctggaaaaggaatgtttgagggtggccttgggttcctgttggctgtgaacacactcctaatgagctgccctgtgtctcagtttacacatggtatttgaaattgagtctaaattcccatttcttgtactttctgaggagcagtcaagaaagagccagatttacagtttgccagtctcttagctctatgttccaaaggaattaagtcactcttcttgacaatggccttaaaatagggttttaataaaatgaaaagaggagcagtggagccacccacccctgtcacctgtggctaaatggatatacgggcgccaggctgctacgggagccttttgtggtgtcacctccagtgccagtgggatacgtgccgcaacagagaccagatgatgaatatatttttaaacttggaacccatgaaccacttattatttctgaattaggaatcaaaacatatgaataatttcaacagggtttcagcagatgtattctgcttttaaggtcactctgctttgcggagatggtcgggggtaatggggagtgaagtccagcctgattctctttgtgactcttaggacatctgtgtcatgtttgctcaatttagcagtcaccgtaagtgtgatgcgaggccctcattgcggggtcagggtaacttatggaagcaaacagccttctttattttttaatacatcactgtcacctgcgcttatgccaggggttattagaagaagaggggctctgggtggccatgtgttcatggctatgatgactgaaaaggccacagcatgcaacagagtcctcagatttacccccaaatgcttctcccaccctgtattctctcttagcatctctccctgaacctctttcgccaaccccctaccaaacaaggtccagaattgaggtgttctggaattccagccttgctaagctctgggattaaggccagtcatttggaaaggggatgggggaagaggcaaaaacaaaacaaaaaaaaaaacaaaaaaaaaacaacaaaaacaaaacaaaaaaaaccaactgaacattaaccctttgggtccatagcactgagaagacctcaccatttcggccactggcaaatcagcatctcttggccatatccccgaaacctgagcttcatgtaccagaaggagacagttaagccaagtcaggctgatgaaaatctctccgttctaatgactgtgcagggtacacctgttccagcctctcacttgctctcattgtcagttggacgcaggtattgaatgaccactgagtgtggagtgcagcacgggggtgctgtggaggaggagagttcatgagcaagaagagaagcagtctcttgacctcaggaagcttgcactgtgtttggggaggcatggtcatgctcactctcttgctctcccagcacaaagggagtgggctaaagggtgggagggaggcagatagttactgggcctgaccctcttctcggggtcagccacagatcccagatcctttaccttcctcatctgcctgttttcctttatagttctattggagttaaaaaaaaaatgacagcagtgtcagtaacacacactcattttaacaagagaggcagtacaaagatatctataaagaattaacagtattccttatttgctctccatttcagctctcctctagggaaatgaatgtgctttatttttatgaaataatttcaagcttacagaaaagtttcaagaataatacagagagcacccatatcaccttacccatttggagtttactgatttttaatagtttgccccactggtttccttcctgatctatgtaaccgtagagcagccttttgaggtaggagacaggtggtattatctttttgtgtgttagaggtgagaaagctgtggcccatggagttgaggagtgtgcccaaggttatctaactatccgacaacaggtttcccacacaaattccacatgatgtcattcttgttttcatttttgtctttccttgtaggacttttttttttttcatcgagcctgcagaaggggcctgtcttgccttcacaaggaggagatggttgcaggaaagtaggaggtgaaaggtgtcctccaagtctcctcccccagatcagtcggacctcctggcctcctttggttttccctctagggcagaagcggtgctggctggagggggtccaggtgctgtttgttgcaggagcgccatcttgctttagacctttttcgtttcagacagctagaggaggtcttttacggtcctacttgacccccataaaggaagttcactccacaatacgcatctcttttcacatgaagaggcaacagagggaacaaaaggagcaaagcagccttctcctgaagaggtgaaaatatcactgccttttggagccagatctgggtttgcacactccaactcttggagtgatgtgtccttatttgtaaaaggagagttctggagtacattgggaagcaagtcatcagtcatatccacagcctcctgctcctgttaaatgtgtcctcctagatggaaaggttggaacaagctgtgccccataggttctgccatttttaggatctttctggcactgagacttttgcttctgtgatctctcattggaatccatttcttttgcccaggcgtggataatgcttttgtctaatgccagctctgccccatctggtcttaaaacgaggtgaatctgctgctctgtattgaaatatgtgatctagaaggagccataaaataggaaccttaataactctttctctctgtttcattatccatgcagttttcctggcagttgtccattccggcctcattcccacctctgggacatgtcaagttattgaggtggtactggctgtgggtgactatagatctgggccagcctgttcaactgggtcttctggggttggtcctgggtagagctgggtggatgtagtctaaaacagagaaggtagtgaggcccttcacatccattttaaggaagctgagtattgttgttgagagtggccctggcattgtcttcatcaagaatggggttagggatctggctgcagtgacactggtgaggtgagaggttgaagggatggtcagacattactgtctcttgagcgaggttctgaaagtctattccttggagactttcacaaactggagggagaccctgtgtgtccttggctgaaactagaggcccaggtcacatgaccttgggagagaagccactcatggcctgaggacccagtgagctccttgacctacgaggggccatcctgatttctccacttcccagtcaactctagaatggagtctctgcctgacgaaattgtggttattttgaaatcagcttgtcatgttccttgattgttttgggtgtaatagtctcttctctgcagcaggttgtaagcatcttgaaggccaggaccttgtcctttcttctttcattggagcagaggttagggaatgctggcttctggacccagccttggaccccagggttagcactccctggctcttgcagttcccccttgccccccaactccactattcccctggatcacagagcttggtgacagcagtgtagccccttcatctcagcgtgatggtgggagggggtcgtatgcattttcaaagcctttcctgtgtgatgtgccctcctggtgcagcttctctcatgagaatccccagcctagacgtctcttctcttccactgcagatcaagggttctcatagtgacctgctgagccacgtgcattggactcccatggtgtgcgtgtgaaaattcctcagcccacacggatgggccagaatcagaattcctggagtgggagcagaactctgtattaaataagccccctcagataattccaatgtacactaaagttagagaaccactgtaatggtctgatgtccctcacactccccaccccagtacacacacacacatgcatgcatacacacatacacactctgttaaatggctgcttctgctgttgctaagaatactttgcttttcaggtgcttgtggatgggtaggaggcagtgcctgattttgagctcttgactaggaattgcgtcaatagttagaggagggaaggatcagaaaggggacctcagaatggggttatttaggggctggggagtcagaagaactcagaaaggggcctactgcattgctggtgaagcctgaatcttccatccactgttagcacatggctatgcagactctgattcccatctgatgccatatgtgcttcctccacagtccgggagaggagctttgggtcatgtgattagccttttgccctggacagcgcagctaagctcagcacatgtcttgggatggagctgcagaatcttggtgccgtctcccccttggaaggctagagtcttggcactgagaggaagtccttcctccatccccagcctcctgactccattgctagcgactcccagcaagttaagaaagattcagtgggaagggtatagggctgggagttgtctggatctaagcctttcttgctcagtttgatagactttggaaaatctctgtctctctgggaactcagtctcgtctggtccctggctttagcacagtgtgtccaccattgcagccatgggcgagaagccactagagctatgtctcttccttaggagagcctgggggggatcccaaggtgttggtggtttggaagggcagtgaccctgcatgaccaggatccatttgcccaggcacctgctctctgccagcctgaacacccgggagcacctcccggatacgacagccacccactacttctgcatggccgtggccacatgggcacagtggggtgaagtgaagatctcagactctggagtcagacagtctggggtttgaatccgagctccaacacttctagctgtaggatcttaggcaaattgcttaaacatctgacctttagtttttttcacctgcgaaatggcgggtaaaaactgcgactagctcctagggtgtgttatgggatgcagtgaggtgaagccaataaaacccttattagcacctggcacacagtaagcacttcatgagggttagctgtgcttgttgttcctgggtgtgtttggaggagacttgtaatcttgtaaagtgaagttcaggtcctcagagacaagtggtgtctggctgtgggttctggccattgaaggcctgggtggtttagaagggttttaagttagtgccttccctagaggtgggcacacgtctgtcacctgcccctgatgtgctatttatcctgccaagccctggggcactgaagcagcccagaggcggctactgcaaacaccagggagagatagagtctccaagaccccaaatagagtttgcaggacctcttgagctctggagcaagaaggaaagggacagagacaggccccagtgtcagtggcgggttgggagggagcagagcacagctccccatgtgcgttcaggtgcccagaatctgtttggccactttcatctgggtctgcgtgggtgggggcgtgtggtagcccagaacccacttggcaccaggtacaattttgtcttcagctccagtggctacttttctctcctttgcttcactttgaaaatagtcagcaaaatccttatttccataagcatttttctggctgtaaaaagctgaatcccaaacctgttattatagctgttcatgctattttaatctgctctgtttagaggtgagagggtagcagtgactctgcaattactgagtacatttgatccgtggcgcagccaccggagccggcagagaacccttggagtaggatggtgtcgtgtgtggcaaatcactttcaaatttactaaaacgatgcccctttgcagccatgcagatatcataattttcctccccaaggcttgttgaaatgcccatttgcttcctgccttacgcaggctcccagcacgcgccccttggcccacctgcctattgcctttcattctttgtcttggccagattctgtctggtctctcttgccctccgcccctttttcttcttcctccctcttcatttcctgctcagaaatattttatattctactgactggcatgcttgtgaaaccattttccatttgccatggtcagaagaaaaatagttagcattttaaatctaccaactatttcacatttaaacaagctggcaagccgcaatgacgctgcgcctcctacatacagtaattgttgcatccctaggctcccttttctatctctgttcctatttcattcatttttctatttgcagccagcacagaatatgggcttctcccccctccttctctcctgcggcccgctttctatccagtgaccttggcttctctgagtgccgcaccgtaaatgaaatgtggcattgccacatgtatcttgataaaatatatcagtggatgaattgattttcatattgatttccttggatgagcaaggtgtgtgtggaaatcaagtgtctcttaatgatagtcctagagagagacaggatgcccagggaggagcaggctttgtttttctttcacttacgaaaagtttctgcttgttagcttgggagggaggcctgtttgctttgaaggcacactctctttctgggggtaaacagcaaatgtcccaagggtgtgtcctgatccctgagaagactgcatcatccaggtgaccgcctagagccttagggaatgtatccctctggactccgccagctgcattgtctttggagagagctgaaaaactctcaaggcatgttggaggcccttgtgcaccctgcagggtggagggtcttggctggagagtggccttctccctggccacttccactttcatatttcaggttagttgagacgtggcacttatgaatctaggactgatgctgtgccccaagggcatgactgtgtataattcataagtgtcagcatcgatggctggctgtgtatgggcatgtgtgcttgcgagcacacgcatctacaaatatgtatgagctttgtatatgggttggctatgaatgtgggtaggcagcagtccctaggcttgcagtggcttttattagcgagctctggacaaccaaaaagacagcatccagtgaggtgatcaaaacttcatttcatctcctctgcagttgctttcccaattcactctcccaactgctcctaaataaaatagatgctttcagctgagagttgaatttctttatgaggctaagtaagcgtggcttaaggtgatactgtgcatgtgtgtgtatgcgcatgtaaagaaaatgaaacagttaactggaatattcaggatagagcgatgataattcattacattttctggctaactgaggcttaactggaaaatccttttagttcaagcactgctgaaatgctttgcaaaacagactaggatattttcctgcttttgtaagtagaaggtagtgaggtaattgcatcctttgatgtttcatgatcttgcagcacacgagggccggtattttggttatcatttgtgattgcacagtggcatacaggagatggagaactagcttggattcatgtttaccctttgatggtggttctcaatgggggacaatttcgtcctccagggcacatttggcagtgcctgagacatgtttgcttgtcacaacctaagaggttgtttactgatgtgtagtgggtagaggctggggctgtttctgaatttcctatcgtgaacaggacagtctccttctcctgctcccccaccccactacaaagaattatttggtccaaaatgccaatagtgctgaggctgagaaaccctttcaaaatttttgtcccaaaatttttactaaattcttgcacataaaatcttttgttttctctgtttttttctttttaagggtcaggtgctggaaacgttctgaataattgaaacttcgaattcattgacgtttattgttccacagaacaaatagggaagcctgccagtttgcagataggcaggcctgtccccagatggccctccagtgaatgcccaaattcattcagttatttagggccattaaaaaccatgagggccacactagctttaagttgagctaggcagaataaacaatccgagaggggggacatagctccccccctttttttcattgcagttcaaactaaaatgctcagagacttccggtagcactttctaatgatgcagggtttattctgcttaccgcgggtcagagacaatctgacgatgacagacttagaactgctttcagaatgtgtaaacatgttcattggtttgaatggctctaagtgagtcttcggcagaatctgtctggttttggtatgatatatgtatcttggggaaaatggggagattttgcatgctctgtatctttgactttctttgagaaaatacttgggagtcaatgagttcacataccaaaaaagccttatgcagaatctaactgggtgtgtgtgaaagggggagcggcagaagttaggaagactgaaggacctcctttatgacagtaaaaaaaaaatcttttaaacttaatttcaaatgaaactttaatgtcaaatgttctggaactgtcacacatcattttgttaacctatacctattaggtataggtataggtctagaatgctgtacaagacgggttaaatgaagtctgtgtgtgtctggtgaatgcatatgagtagttagagatacaccattcaatacttgatttatttgtgcaggttacctatcatggtaacctctggcaggggctcattatttcatataaactaaaaaggaaaaaactatgcctgcaagactgattgattttctgaatcactcacaaagggcagccatgcagcccaaacacacttcatctctcaagttttattttagccttttgccttacaatgtctgtcagtagggacaatggtagcaccagaggcctgggggtagagtcggagggatgaagttccgctgccctctagctgtgtgaccttagacaagttgcttaccctccctgagcctccatcctgccccctcgcaagcttgttttcaggataaagggatgggaaagccctgtgtaaatttccaagagctgagtaaatataaagtgctctggatattgttccattgttaagcaacggcaataccatttataaatcaggttttgagtccatctcgagcattgttcatgagaggggccggagcctcccggcaggcactcctttaagagctgttatcacggattactccatctgctgcttgctagccgaaatgctaaatggagttgtgggtgtacctggggtctttcttgttacagtatagactctgagggggtctagatgtgtctcccctcctttctctgagatagaagtgtatttatagcctggtgtaagtacaatcagaaggttcctataaaactctgttattactgcagtacaaagttagaaatgcttgaggtttcggcttcttggctcttccatgcggcaatgaatattttatgggaaaggaaatacttagtgtctgactctttttatagtgcagctactcacagtgctggtaaccttccaaatctcgccaaaatcaaaattgctgcctgtccatctctctactcccttcttcacaaaattgactggtgtcctgcctcgctgaggtgtccagattctcttggtggacgggtccatttacaaaatgtggggggtgcagttttcaatcctagtgaatgccctaaaccagaggcgttggctcctccccagccctgccccacccctggcaccttgtggtgctggtcagccccagcagggcctgctggcagagtgcccactggatcttccattgaaggtctccatctgccttttctgccatgcccctttcctgcatgcccactagccgctgagtggaggtggcccaacctctccaaagttcactctgatcttggaattcaaaaagcaacaggtgagtttgaggtccaacaggcccctgaggggcttttaaattttaaggcttgagcttcggctgaagccctggcacagagcagtcatcgggctggtaagatttccctctcaggtcctcttcctgtggtccctttagtgaccccacgcataaggcaggaaaattgggcctcagtggtcttggccctggtttactagatcagggactttaagtagaggaaatgggtctcctggcaggtcagcatccatggaaattgctcccctggtggcccaagggcattgtggcacaggtgttccactgggttggccccatggtcctcagagacctattacgactatagcaggaccgcagactaggctgatggccagattacagtgtcaaagaacacctttctcaggcagctatccctcatggatctccttagaggcccccacaggctagtgaaatgttgacatctcccatggaggtgggctcagtggcctcgtctttttaccagtacccaaaaagcccagagtggagagcttggcaggtgtgaagtgtggctcctgagatgcacgggagcacagctggttgtgtctcaacactggatcgtgacagtttttcttagcatgggcagggctgtgaaaaatgcttaacataatctgaatgtgggctccacacttaatttagtaggactctgcgagctcaccagcatcattgcatttgccttctgctctgcccctggtgtttgtcttggcgccaaagtaggtaaagggaaaaaatgatttgcaaacctctggcagctttggtttgatctcccaactctggttgcattactgccaaacagagctgtattttcacatgacagcttcgtactgggccttttctttctttcttttttttttcttttctactttttggtatccaaacttggtggtagcagaaggcaaggtggggaatagagagcttttggtatcacaggcttagaagctcatttgtctcttaagatgtgagggtaaggaaagggttagttattatttttgataaatgggaatggggtcagccaatggcttactggagaaactagatatagccctttatacttaggactgaccacacagttgaaattaattagcacagttgaagtaattagcacagttaaaatttagggttcctatgaccatgaagttgatgggtgggagataggtaaggctcgaagaactgaaaaacctcaaatgtgctaaaagcttcattattggtccttattcatattttaactcaccctcctcatctgtgaagtcattttgtttaaacaatgaaaatggataaaagaaatggaaccagagagagaagcaagagagaaaaactttaattaagtgcctattgtatgatagacactgctgtgttcttttaaataaatacctttcagattaattccaaagctaagatttagcaattccctggttctgggattatttggccctaggatcagataagccaccagtattcactgagtcattcagactccagagttgcgccagatcccatggaagatgcaagaatgcatataggctgtagttccttctcttgggggttgagatcacacagctgtatacccatgtgtgcacacacagagacagatacagctagtggatcatgccggggggaactatacattccagtgctccagaaattcctggcatactgtgcctggggtattaggaaggtgacttgtgagtccctccgtgggacactccacctccttatggcagcttgtggctgccatgatgaaatgaaacacccactcctgaagatgtacaatttgtgagtgtggtagacaaaatagtgactccctaaagatgtcatcctagtctctgtaacccatgagtatgttagattacatggcaaaggaatgacttaaggctatttaccagctgagtttaagatagagaaattatgctgggttatccacctgggtccattgtaaccaacataacctcaacggtctttaaatgtggaagagggaggcagaagagtcagtgtcagtgtcagagtcagaggaggagtgagccatgggcccaggaatgagagcagcctctagacactgaacaaggtagggggacagtctctccttgaccctccagaagccacaaagccctgccagcaccttgattttagcctagcgagacccattttgaactccttccctacagaactataagatacatttgtgccattttaagccactcagtttatcgtaatttgttatggcaacaaaagggaactaatatagtgaggcagaagaaatctgagtggctcatccttgggcaaatgggagccagtgctgatccttttactgttctcgggtgctcttgcaacaggaagtgacttgcagaagtccttttttatctgaaatgccagggaggatggactcttattcagcctagcttctattcagctcaaaggaaagaacatctgcctttttcccacatcttctctgtacccctcacttccttcttgtgggggagattccttttcttcggtgagttccctttgcggtgtggaatctcgtggcaagggctctgagtaaaggaggagggttgcatggaatgccattgaattcattaggcttggactctagcaggaatgttgcctggggtgctgatgtccttctcaaccttcctttgctggagtccttcttgtaacttgtcttccttttgtgaacaacctgggtgtagtttttaaaataagcgaattctcctagaagtgttaaaaatgagccttcaagtactatctcggcattttgcaaaggttaaagcccccactgtttgggggctgagggtgctctatggggggccacccaaaagcaactgtggaaacagagtctggcttcagtctctccagatgttgtgcacataagggagggactcttgagctcatagatcacagatctgtccacaggctgtcagtaggaaagagcatcttattttacagatggggaaactgaggcctagagagcataagtggttcatgcaagatcttacagagagtttgtgagagtctgagagctgttccccctactattgcaacatttggaatgttctgaggttcttaccttctattatcagtttgagggctgtagatgagttgtggtagctacagagatgagctttccagtgtgcccccaccaagagatgaatgaaagtcatcatcgggcagatcactgcctactaaaaggggtgggtttttttggggggaggttttactcttcgtcacagaacttgagaatatttctactgaggatgactttgtctttggggcttccattttatttttaagattcaagtgtagttttaactgcagggcattagctcccttgtaggtcacctcgtgctgtctctggggtttatgactgagctctcattccttagtcacatgtcctatactcacacttcctatcccattttcctgcctcaccaagatcaccacaatgatcccaggttctatatagcatttcttttctggagttctttaaaaatattctgggagatctgtctggaatgcttgagtacattcatttattcctgtatgcatagagggcccagggacctcccaggctctctgagccctctgattcttagagggttaaactattatggaaacagacattgcatctgtgtcttctcttgtttcctgcatgcagcagtgacctttggagtacactgttcaggagaccgacccttttctaccatttgaagtctgctattctcatctctctaccaaaagagaaactaaacttcattgtcgtgattaaggtcacagccaacagcagttaaagaagccgttggtcttcccactcataccgcttccctctccctagctctcaggaggaagagctctccaaaatggaagtgtcttgggaaagaaatggaagtggaaagagaaagatgaaaaggccaccaatggcacttcccgtgtctcagcctcaccagagaaggaacttggccacacactggttgggtataccaaagtgacacaatgtggatgttccagtggcaattaagtatttatatgactagacttgaggagttccaggccatgacacttccaaatccttccagcccgcttgtggagagaggcccggaggcttccagcgagacaattagagtgtgaattagattgtgtcttctggaagggagatgaagttacctgcctactctattacagtttatttcattaaggttgaccatgcccttttttttgggcagagggaataggatggattctctggagaaaacagtgtagcaaggcaatggagaaatgtccacactggagtaaggggctttctgggacctggatggagtctccttcctcccctagggaataggacagaggtgggaaaggtgctgcctgactgctctgtgcacatctgcatgttggtgatgagtgtggccagccccatgctgtgcatcggtgagaggaccgctcaggcaggtgttgctgtgctggcagcttcttaggaaggcaaggagcaaggcgtgggctgtggggcccttggggcagagcctgtcatggagtgggatgaaagggtgcacgggacctgttggcagccccagcggccaggctctgttcccaagttggagagagaggcaagtggtgagggagggcaggaggaccagtcatgggtttaatgcaaaatgacagttacgggggttgccattttagagtaaaacaggccatgtgactgaagagcaggtagcattcatattattcatatttcgagcttggtagatgtagaattttgcagtggaggccaggagaggatgtgagagctgcaggacagaggcataggtttttggaggtggttgtggtgttccccgatggcaatcaacttcacggagagaagaggttattttctacttaggttgcctggagcctacattccaaacttttagtcctcttcatctagcactaagttttgcatctcccttattcctgtcatacattattagtgtgcactgttttaaagtcttttacatacatatgtcttgcattccctacttaattgtaagctccttgaaggcattgcctgtgtattatgtttctttgaatctctctgtggtggctaatgctctgccctgcatttagtaggcaataagtttgtgttgagttttgagtcaactaccactcttttctcccttcctcttttttaatttttttttaaattactttttattttttatttgacacagagtcttgctcggttgcccaggctggagtgcagtggtgcgatctcggatcactgcaacctctgtctcccgagttcaagagattttcctgcctcagcctcctgagtagctgggattacaggcatgcaccaccatgcccagctaatttttgtatttttagtagagatggggtttcaccatgttggccaggctggtctcgaactcctgacctcaagtgatccacccgcttctgcctcccaaagcgctgggattacaggcgtgagccactgtgcctggcctactcccttcctcttacaaggctccttactcatttcctgcgtctcacctgctctctcagcccagttttctaaaaaaagaggtaagagatggatgccagtctctttctcctccagagtgattttgtgaggatttgtacaatgcaagtcttgagatgcaaatggacatctaggaacagaggaattgctggagcatggagaccacacttctgaagatggaaggagacccttctccaggctgtcgcttttgatttgcggttttcccattgccaattgctcacactgatccccagtcctgaaggggatgggggctgccgctaattccctggcatctcatgacttcctgttttcctccagttattatttttattgtacttccttcctgcttcttcactctccggcttcgccagtttgttccgtgtgatcatttcagctttatttggaaactggaagcctcattttactataatagtttcttgacgattttctaaatgaaacttgcatacttcatctgctcccccactgctcagatattaaacaaatatctctaagaggtttccttctccccccccaaagaccagcagtttgctcaaacagatggcgagagatggcgtgtgtgggtatgtgcccgcggtccacgtgtgtgtgtgtgtgtgtgtgtgtgtgtgtgtgtgtgtgtgtgtagtagaggattcttatggaaggtgccagtttctgcagcatcttcttgcctttttggcatccaactacggagcaagacagagcctcctggcaagtgaccaaacagagtgagtgtccggaaggcccgtcaccctgatattcacgcaaagaatctgtttctctgtgaatgggcggctgtggaggaggccgggggagcaagtggctggccagcctccaaggccagatgttctgtagtaccatatgtcaggataggaaggacggcaccgagggctcctagagcgtgtcagacctcagctcttgaactctgtaatcctcatgcccccttccgtcctcggtcaagaacgaacaatgcttccctctttgtctgcttttcaaccccacctcttttctccattagctttctggtctaaactcattattgagacccctccacaacattcaccttgcctctcctttgcctggccccaggctggctgcccctttttctggaatgatgctgttttggtgcctgtttccctctcatctgaaacaaccacctcctcttctatgtctgctgcctccttggtatcttctaagcccaggcatgagcccccctccttggggaggcctgagcttttgattcccactcaggctgggtgttgagattgtcctcaggacctgacgtgcacatgtaagtactggtttctcttatagtgtgtattgtcttccctcttcaactaaagctttaggagggtaggttggtgtcttatgctttggttgtatccttcactatgccaaataaatacctatcaatcaatcagtcaatggattctcaacttgcctaggcccagaacagaggagacctgtctcctagccatgttgagttggtagccagtgcagggtgctgaaggaaagaagtgtagctcctcggctgcccattcttgctgccatctgcattctgatgagtagaggatggcatgtttagttggttggaggtaacgaacagaagcaacagctcttttgagttccctgctgtggtaactcttactccgtggagtcactcaggcacctgtgctcgggagtagatggagataggaggtttgttccagtctctcttttcttgtaccttcctagggaatagcaatgtcctgtagatgtgtgacagtgataccatgttggcattttgttctggaaggctgacctaactactgtctttggaaacattctccttctcaatttagaatttgggcccttttctctgtctgtctccttccatggtccctgcccacgctgagcctcccgcgcccagccagctccattgtttcaagaagggctttggggctgctcgatgactgcagcactgggaccaaagtcctcagcatcagtctcaggactccgcatcatcagcccactctaccgcctccgcaggctcctcgccgctgtcttcaccacctgcccactgtggataagccaggccagcctcctgaaggcttgcccggcggggtatgctcatttctaacaccaagtcttggctcatgtgatgcctccatcacacggtgctccccgtctcatccaaggcttttccattcttaacatttccaaacatgggtagctagaacccttcggagcttccagagcccccgaaaggaccaactgaatctcaccatatcctcagaccgtctgcagtgacagcagctactgttgatctgctcctcttctgcacacccatagtgatttgttgacatattggcacatcaccacatcctcctctgtctctttctccatctctgtcttgttgtccactaggttatggactggccagggacaggggcctttctcttctttagtcttacactagctacacacttatcataaagacattatgttctcagtgttgtgctaagttgttttacatgcacagtctcatttatgtaccttcgcaggtaacagtattgttagtctgcttgacagatgagaaaactgagacttggaggatcccaaagtcttagagcctagcaagttgtagatctggaattggcagacagggcttgtgtcagcctaagttcttaaacttcccgttctactaactagtggtatcaggctctgccacttacaagcttaacgaccctgggtgagttgtttatttccttgtgcctcagaaagaaatagaaataaaaatacccgcttcatagagttgtcctgaggatcgaatgagataaggcatgaaaatgcgcagaatagtgcctggcacatagtaagtgctcacatatgtcttgtacagatttgcttctaattcttcttcatcaccaatatcatctaaacgttgttggtattacagttatcacttttcgtgtctctgacatcattttagcacctgagatgatgttatgctcttggcttgtgctcaggaaatgcttaatgaatgactgaaaaggcacttgggcttctggaggtgacttggtgacaaatgctcagtgtgatgttgtctttgtggcagatgctcattatgaggttgtctttgcctatattcaggcttggcaggttcttgtggcagcggtggttaaggattaaggcattgtgtggagtatggtgggggctgcagccgacaaccttcctgttgcctaaaaactttttttccttcccacccccttccccagtagctctatgccctgccaagtctgtgcacaagccttgaaatgacaaagtaccctttagttaattgcacaacggattgcctagagttaaaagttctgatttatatgactatagctctaactgctcaataacacaggcctgtaatctaccttcatttcaaacagaacggtgatttatagggcagcatgccgctttagctcagaaatgaggtgttcaacatatgcgctgttgacataaatttggaatttatcgctgttgtcaaaactgcctgttggacaaaggtgggtattaaggcaataaatggctcagaatagttttctgtcacatttcctaaccattgtattcagtctatttgagggaaaaatatatacttaaaagtaatcaaatgtccaaaatccatgcatcttgttttgaatggtgggaagggaggatgtagggaggatggaggagcatggggccttggggaggggagctggggggattgtggaggagaaagcttttcatgaagttatggcccgtttaaaaaagattccactctgcctcctcccccatccccatcgggaggtgggctttcctttctcatttacaaaaacggggaggaaaaatgaaagctcattaaataaaaatagtaaaggacatttttatgtgtgggcttaaaaccagcaatgtcagggaggagttagtgagtggggctgtgagggaggcagaacaggattttgtttatggggaaataaagcccctggccagcgttggtttctctgctgccttggtgagcgtgggcttgctcccacctactctcccaggttccgaggctcctgtgcacacggtgaatgtgtgctggctgatgagggtgaggagcggtgggtacccggctctaagcaatatgttctactccatccaaatcccgattgatttattacccactgtacagccaagatgcatccacccctcatccatccactaatgctgtgccctttgcaaggcttgagaatacaagatgaatgaggcaaagccctgtcttcatgtagctgcccatccagctggagagacagagaaacaagcagatgcaccctagtgagtacatctgctccaacagaaacacacttaaaagacagaggctgggggggaaagggggtcagctttgagaggggacagaggggagctactggggaaggcttctagggatggtactgaccctcttgcctagtgaaatgtccttttggaagtatcaggttcctgcagggagattacacaaaaatgtagaaaaaatacgctagtgacaggtcctccctccatcccagatgtgtgatgttgtggtcaggtgatcactgatgtgtgtcagtgtattgtaagagtggggccaacgtccttgtgcattgaggctccagcctctcttctcctccatgccatggaccgtcgctgcatcatctaagcacagggcacccaggcgggtagcacaggtggcttagcaaatgcagtcagagtcaaggttaagaatcgatctcttcattctgtttcaagattacatagcatgcagtatgttgttgggtattgtgttgcaccgtgagactgaaagtgtggatgtttccagagagccgctgcttggcctctgtgctcgttgggcctcgagtcactggtattatgcatttcctgtgtgctcgggagccttgcgtgtaaggagcaagaggagcacgcaagctgcctggtgcttttccccatgaaaatgaggcccagcagggaagaggattcgtatttgttgcttttattttatttttccttttatctccatgcccacacgcttggaccgtctcagcattgataaatgtgtgctctcacaaacatgcacacaatcccctttctctggcctgtgtgtttgccagacacacacacacacacacacacacacacacacacacactcccacgcacactgggcatggacaccaattgtaaacctcgtctgtgtggctcaccctccttttgccaccaacccctgtccttttcacacaaagctccctgttgggaaaactcataattttcacaccacacagccttgactggccattgctggaattactgtctctttgaagtgctttctactggggcatttacaggccgttttaattacctgcagcttgcaaagggccttgctctgtcccagcctttgtttgtttgttctttgcaaggagtctgtgtagaaaggaatacggctgacttcttttacaaaaaagaaaagggggtagaaaaagaagtttggggagcccttaacagagcttcttgccgcagcctgctgtgggacaccatgcccactctaacaaggccaggaagagaggctctcgcccttggctgtcttctcagcaggttccagcaccgtgggtcccactcctggagcttgcctgggatatttttgttcatgcgtttatgttttaattattattaagtatattttcaagctttctaccagagacagcaagggctgtcaaatcatgtttccctcactgttgaccaaatcaaagctggcttcagttgagctgggatccctcttatattttcaactaaatctgttcaaggaaggtgcattattaaattattgagtttagacgtgggctggagggtaggggttgaaatcacatatgtgaaaggagtgcccactttgagctgtctggtgtttttctttccttttcttcatttttcacttgattctctaaaaggaactacatataaatagcattctttggggtttctgttaaatatgagtgtagcatgtcatgtctgcagatgaagatgctagtttaccaaagaagcctcagaactgtatcccctttttggggggcttttacagcagaggaaatctttattcatttattcacttagtccaaaaatgtattgagaaattggaaacctcatacattgctgatgggaatgtaaaatggtatagctgctttggaaaacagtctggcagttccttaaaaggttaaacatagagttaccatatgagctggcaattccactcctaggtatatacccaagagaagtgaaaacatatgtccacacataaaacttatacacaaatgttcatagcagcattattcgtaatagccaaaaggtcaaaacaaccaaatgtccatcagctgatgaatggataaacaaagtatggtatatccctacagaggaacaaagtactgatacaagctatgataggaatgaagcttgaaaacatgctgtgtgagagaagccagaccccaaagggtgcatattgtatgataccatttatatgaaatgttcaaaataggcaaatctgtagaggaagatagtacatatgtggttgccaaaggctgggggttgaggggaggaatggagagtgactgctaatgagtacgaggtttcttttcagggtgatgaaaatattctggaatttgatagtgatgatggttgcacagttctatgaatatgctacaaaccagtgaatggtatacttgacaaggataaattttgtggtacgtggaaaatacctcagtaaagctatttagaaaagtgtactgaatacttactctatacagcacaccctggcatactctgaggttatagtggatggtttctgccttaatgtaacttatagtctagtagagataaagaatactaataaaaagctaatatataactgaaaattgtgttaaatgttataaaggaaatcaacaaaatgcaatgatggaaaattgcgttgatggacaacctacctagaagggctgtgggtcaggagcagcctgactttactggagtccagcatacggtaggcgcttaacagatatagggtgagtagcagtggggcatgagtcggcttgccttccctgtagaaggttatgaagtccctgcgagacccacagcctgtcagtagactctgggtaccatcattcaatttactttttttcttagaggcctctctgttcttgcttctattcaattagatggagaaaatcccaggaatgctctcggtgactcctttttagctgctggttttcctgcccctttcagggaaagactctggcttaggtaggaatatgaaggcagaccctgaggtgagaagtctggcgaagtctgcctgtttataggggcaagtaagtcatgtggcctcactttctccatccacaaaatgggctctatactgtccatgtcagccacagggtggttgagatgatcctcaggaagccctttcaaagtcagacatgatctataaatgcattaccttctttatcattaaaacctcagttggggccaggcacggtggctcatacttgtaattccagcactttgggaggccgaggcgggtggatcgcttgaggtcaggagttggagacagcctggccaatgcggtgaaacccccgctctactaaaaattaaaaaaaaatcagctgggcatggtggctcatgcctgtagtctcagctactctggaggctgaggcacgagaatcgcctgaacctgggaggcagaggttgcagtgagtcgagatcacgccactgcactccagcctgggcgatagagtgagattctgtctcaaaaaaaaaaaaaaaaccaaaacctgggttgactagatgttcttttttgcatttttctagaagaaaggaagaaagaaccagtaaggaagctaatatctgtttggcttttgctttttttcttcattaaaatgacaataatgtttacaatgtgatttggtacccgtacaggtaatccgttcaatctcttatcttgtgttcataattgatgtttagagtgatagctctccagctcagaatcctcatagaaaagtaatttaattttcagtgtaccaaagcagaaagaatgaggcaatatacattaaaaaggttttcagaatggtttaattccagaggaactttcttcttaggcctttaataaacctcagttattctcaacaatctctgagtttccatggctggtccatgggatctgaaggtagcattgtgtctccctggctagagtggaaacatataaaaatgatcctggataaccaggagacaacatttccttcgcatgtatccaggcagaacaaggagataaaggaaaagtctgtagctttttgaaaactgttttcccagaaatcggttatttgtgctggttaaaagccttgtacgggagagggagaacaaaaaccctgttcatccataaccatagtttaattcccttatagggccttttaggatctggagagaatattttggatttatttttgtttcccttgggctgacatcatcaagcatgcatcatggtgccctgttttgggtttggaaaaagctcagagaagctataaatcttaaagcattttactattttttccttttccttttctaaaagcacaacttttctggtctcttaaaagaaaaagaaaaagaaaaaactacaaaagtatgtattgatctcttcccctcggatcttaactgccctggctgtaataccttgcttacatctgccaggtttttgtgcagttttgcaacatctccttaatccagtgagcataaatagaacatttcaatcatatttggctaccaggaacttcacagataagcacgctaagaccttgttgaaagagactgtatgagattgtgtgcgataagatcatcctatagcccagtgcacaaatgaaaaacttttgttcttggtgaaatttgttgatagagatatttcaaataaatgacttaggagaacttagtattttaaaacaaaggaccggttacgtagcagccagaagcccaggcctcttggttctccacagccacgaagatccctccttgagcagttgctgcagggagattagtgtgcccctttgtcatttctgacattgtgttttagcactcgcaggcagccttatctgcaagtgctgtattcggtgtggtcatggccccagggagtgccattgtccttcctcatattttcaaggctcaggacagttccctccactcttcagtcagctccagattggccttcatccaggccaaggcaggatgcataggatgcatggctggctggctggcttgcttccttccttccttccttccttccttccttccttccttccttccttcctccttccctccctccctccctccctctctctctctctctctctgtctgtctgtccctctctctctctctctctctctctctttctttctttctttctttctttctttctttctttctttctttctttctttcttctttcttcctttcttagatggagtctcgttctgtcacctaggctggagtgcagtggtacgatctcgacttactgcaacctctgcctcctgggttcaagcgattctcctgcctcagcctcctgagtagctgggactacaggcacctgccaccatgcctggctaattttttgtatttttagtagagacggggtttcaccatgttagccaggatggtctcgatctcctgacctcgttatctgccggtcacagcctcccaaagtgttaggattataggcgtgagccaccgcgcccgcctgcctggctttctttctaagaaccccatagagagcttctcttttggacagtaggggcaactgttttttactggtgtgtgtgtgtgtgtgtgtgtgtgtgtgtgtgtgtatccgcatatgtgtgtagacaaggtgagtttttttccacctctacatttttctcttccgattctctttcttgtttgtttgctcattcagtcaacaaaaatgagcccctgccatgttctgaggtcagtgatgaagactgagaggatgaatctggtatggacccttatgcaggagatataatccagccagcacagacccatgtcagccccacagcctttcagttttgtaaacctggttggaaagaacctaagaaatcatctagctcaacctttgcattgttgcagaggtgtcaagtgaaatctagagaaactaagtagtttggccaaggttatttaatggatatctgcagagccaggtcccctgcactcagcccgatgtatatatatgtacacatatatacatggtcaatataccactgttttaaaggtgattcttaagaaaacacagctggtttggtattttctctctctccctttaaacggttccaaaacaaccaaatggccactgtcttccctaactctcctggtctggatccccagcagagaggcacctgctgtgtgctcccaaaacctgcagcatggaaggtgttaactagcactcagttagttcttggttgtttttcttaatctgttgtttgaaatccttggcttttattggtatatttactttatggcatacataaagagctgtattaaaaaataaattgtgttgtaaaagcattcggtaatgtttattaatattgactagtcagggagcaacgaactctattgctagaaggataatttgtggtaatacccgctaagcattcacagcttgtcaaatgactgtctaatctcaacattaaaaaaaagtgggcaaaagggtaatttcccttatgccttgagaaaatgaaagtgacccattccccagccaacattagaatgattgcttctttttctcccctgggataccaggcctcctttgtggttccaggcagtcccatggctagattttagtggttaggtatccctttgtcttagggtggttggaaattgccttgttagcaatagcttctcatatgtctgttctggctgcctggatctgtgctgaggccataaaagacagagataaagacatagttcttgcccccacagagtgtatagtcttaaggaacttataaatggcttagtcttgaatcttgaacttaatattcctacaaaatacataaggagaatgacactgggtgtgactaatggcctacttagcctggaatgtggtacttttggtggcatgaagagacattccttgggaagacatgatgtcacccttagaaggaagggaacattccccagagtatccctgatgccctatgaataacatggtctggcttagggtagaggccgctagtagaacaggctctgtttagagtattccttttacacaaaaagacacatagaaagtacaggagagctagtctgggcgtggtggctcatgcctgtaatttcagcactttgggaggccaagatgggaggatcacttgagcctaggggttcaagaccagcccagacaacatagcaagacctcgtctctattaaaaacaattatttaaaaaagaaagtacaggagaatggactgaatatggaaacactctgcagtctccctggaagttgctttggggaggaagtactgatagcctcataactttgcattcatcccttcctcttaaaattagagcacagaatgccgttgactatttcacctttcctttgtcatttgaattaaaggtaaatggacgttgaaagtgtgtttttgacttaaaggtctaaggaggaagagtgagcccattgctaaagtacataagctttccctttactcaattctgtgtctacttggaaaggtgaatgaggctagggcaaggttctcttatcaccaagcttaagagtcggttgcttttgcggctgagagcattggcagagctccataaagggacctaccttatgctgtccccacatgggggcccaaggctgcatgtcagcaccaactgcccaggtcctgctcgacaggaccaggaagtttgcatggtggctgggtaagtagatgatcttggagagtgttggttctcatgggggcggcagactttttggagaagagaggatcatttaggtcatggctgggatcttacagaatctcccgtctgcttcctatctattctgagtacccctctgaagcactgagaaggtcaaattgatggtcataggatcagaaaggggtggtcataggatcaaaaagcccaaagcatcggggtgacttttgcactgatgaggtcaaattgatggtcatagaatcagaaagcaaaaacccaaagcattggggtgacttttgcatgtggagtggcctcatacctacaatagggtgagttgggaaggattatgtactgcattgatgtggtctgagtgttggttcagaggatggctcagttaggctgaaaacaaggacaacatcgtcttataaatgcccttacaggatggatttcccactttatttttcctcattcaaaggcgggagagagcagtgggtagtccagctgtggagccctcccattcacttttcccaattacaggtcctagttccccatgctggtctttccagcaaaactcacaggtcagacaatttcaacccttggattattggaactgaggtttctttctctaaaccttccctgcctgttggtctgctccaacttgagcatttgcccctgggctcaggaacctgggaagacatgtgacattggcagtgctgggacatgaacccctctctctcagctaggtagtgctcctgggcttttccctttgacatctgctagtgcagtgagttcttcgcatagccttccccccttggtccctggctgcataggatggaagtgggccgagcttaccctgcagagagtagacatggtggatgcccccttggggctcagctgttgtggtcagctctctctggaagctgaaggtagggaggatggagtatggcttgggtctctccttgctgccctttatgctgctgttgctgttctaggtaggctaggttgataaaggcttaccctgaagatgacaggttggtctaatggcttcatgcttctatgcagtagccattagccttctttgtatggactttaggagccacaggacagggtccagttttgaattggaggctgtctatgaagctgttgtacttagaatattgttaggatgagcaaaggaatgccatagatgccactttacagagagggatttctccagcatccttgatcaatcccttttgaacgaggcctcatgaggaaaggaaatataggcacggtctctgccattatggagtttgctctctaaaccagatgaaatctttatgagtttgcagactcacaatagcacagaaatggttcaaatgatgagcttgtatcttgctagcttcgttttactagtgagagttgtttggttgaaaaccagtgagaaggaatgaattcttctcttcagtttcttgtcaaaaggttcagatttgtttagcttgaatttctcataatgattcagctttcttgagacaatagaaacttgttagaggttaatgtgttctttgtctttttggacataagtgaaaatctgttacaagcaaggtgagtttacctaatgagccactaagagttggggagaacttgagtctgttccccaggaatggagagtgaggacctgaagcatatggggcaatggaatctccactgagtataggatggagatgcgtgggctgtactagaactgggttactttcaaaatggtgttcagcaaggtagcttcttctcagagaagagtgtgtgaaaactctaccaccaactaaggcagtgtgcagaaaggtgcaaaaatgtccccagatgtcttccttcctttcctgtcacagtggaggctgataatctcagatggccacgtgcaattaaaccttatgaaaagacaggactagattgggaagatgtgagtgtgtggtaaggaagaaggaggtggatagaatttccattttgatctaaatgctttgcagttgcataatgtggtgatggtagtggtgggaggttgtggtctaaagagggaatagactgtgagttcacacaaatttgcacttttgctccaggaatcggttggaattctatttccacattggctgttctgcagactgtgccatggagagtctactggtagccaggtacctcaaatgcactgaaattctccaccattattttctttgaattaggagaagccttcacttttccacattcttcctttggtagatgaacaagaattaaagatacgagcaaaccagtgctgggctctgttgaactcccaggcctgtgaggttgttccctttttctctaatgaactttatgtgctttgcccaggtctctctgccagtgaggaaagacctttgcccttgtacttcatgtgaaatcacatggacaccatattaatctctggtaacctgtatggggcactgagttagtgggtcagttgcagggcagtgaccttaccctgaggattagacaggataggacatccgggtctctgaaggcagcgaaatgcatgacaacagagtcattccgaggacaggctggtggtaacttctggaagtttctttcactgaaagataaatagcaagtgagtaaaggaggaaactcaggccacttggattagattttaaatgactagattgctgggattgggtctagaggtttgcttgggcaatcctagcctggctgcctcagtgtcagaggacatcacaatgcaccgtaagaagtgggacgtggctcagggagaataatagtgccccttagaggaccacctggtaggctaggtaaaaggatatgggtaagacttttgaatgataaaattttgtctctattcaaaatatttgatgtgatcttcatcactttataggtgatcaaacacagagagattgtgatagcatgacttgtccaaggttaatggccgagtcaggtgggaggatgcaggtcttctggctgctggctgggcattcttctttgtaccctgccacctctgtagtaaaagggcaagtgcctgtcatctttcacaccaagccaatccagttggccaagataagccacttccaccaactgccaagcaaatccattcatacctagagaaaaggcagtggtgttacccaaaccaagagtgtttatcatggtgagggatttgatttggaaccctcatggagaagagatgggagccccagaggggagtttagcctggtggtggctcccaaatctgaagaccggtcactctagtgtccctttggaaaataaatccaaatgggtgttcgtcctcctattcctcttgacagccacccttcagaagtgggcactccaggagctaacaaacccctggtgaagaaaaggatgaaaataaactgaaacccttatgttgccatccaccagattttgccatgactgtgtgcgagttcacctgccaaaccccttatgaatagagcctttgccactctatagaagaacatctcttagaacagcaagtatctatcatgcccgggcaagtgacaggaatactccaccatcgtgtgtgtttgcatgcactcacatacccctaggtatgtagtttaaaagatactttgtccaaaatgctattaggacatgtcccagtgcccaacattgtgaaatccatttagagttaagaatgttcagttaaaatgttctgtactgttaatatttctcaatttgggtggatcagcatggcaaggagcaagagaacatgggggggtggtacccctacagtgtcatagataagggtgtgtgtgtgtgtgtatgtttgtgattgagaaatcatttgtctttggcaagtggggaaagggaaagcatgcaaacaaaacaatgtgattgagaaagagctctgctgagagaactttgtgtgatccctatcagaaggccgtacacagtggataccatatgctggtcctcatgctgtgggagcccattgactgtggctctagggaggctcacctgggtccaccacatggtcttgacacactgctgggttctcattctgggacttggaagggtgggtggctcggttttgctaccatctagatactgccagcttgagtgtgtaatactccctctccccacctgcagttttatctgttgtcagtaccagctctccagccttttactatggtcttaacacatcaacattttgatggagatagagggccttgttttcccttctgcctgccccaccgcccacagatccggcttctggctgccacgcctgccctgtcctgagggccaaggcccctggggacgttgcagggatggcgcagagactggggcggaggtggaggccagatcctggatccggcaatagcatgtatgggcctgacaacaggagtgtgggtgggcggcagcttggagcctctccccagtgctcggctccctgctagcgcacccggttccctgcatcttaccagctcccgtgctggctcgtgactgagctaggggtctggtgggagaggccccgggttgggggttgggagttgggatgggagcactgctgtaggttgggcctgtgaccggttgttactgggaccttggtcttcccaggggtgataacatgggcctagcccacctcacagaatcacagtaatggcaaaatgagagcatgtgtatgaagagctgcagatgactatgaccaccctacatttatagaatgatgttatccagtttcttgaaactctgctttctgttggggcaagacagagggaagacacttctaaagctgggccttaggggaaaggtgtgcatgttggggtgggtcattgcagtcctaagaacatctggatgccagagaagtatcttatgtctataagggcatcaatttattcacaggcttattcagagcctcctttgtgtcagtcactgtagtggaagttggaggtaggagagagaaaagatacaggtgtagccctcctgggtcccatgggctcgttcacagtcaccacccgggaaaggcagtgctacacagaggtgagcagaggctgtgggcctcctgtgaggtctgtgctagtttgacagtgagcattatgtctgtctgactgtcctgggtgttgcatccttcctccctctggaattggatctgattttttttcttggtccatgtgtcagtggtaaagcccgtggacaagaccaggaatgggtgcttcactggctgcagtccctgggcagagggcgtgatttacgctgtctgaggatccagggatgtgtttccatcggtgccctcctgttcccttccgcctgtcacctgccagagggatggctgccaagcccccaggtaggggatggccctgcctcttgtccagccagagcagcagcaacctctcttttcctttcccttacaggaagctgcacagtgggatgaagacgtacgggtgcgagctctgcgggaagcggttcctggatagtttgcggctgagaatgcacttactggctcattcaggtaggcaagttcgccttagtggcccgttcagatacaggcaaccatctcctgcttgcctttacccctcctcagagcctgctgtggcctgcatgtccccactgcccgctggggccctggtccatcttgttccctggaccctccctccaggcttatgacacagaagatccatcctgatggcggggccacttggatgaacccaccttcaagctctcgtgggtttcccaggcatcagtggcaaccagtgccctgtgtgatctaccttccaaagtagactgcagtttcattagtggaacagttgtggaattaggttctcactgtctaatgaatctgactattgggttcacattatacaggagcctttaattaaatggatatagaaaggttggaacacaaagctggttatagcgtgctgtcttttgcaagttaattttatacaattctattgaggtcgactgtgtggctgctggtaattttgctcatgtttgggcaaagctgctctgccccacgaggcgtggaatggggagaagcacctgacatttggcaggcccgagtgttcttggtggagggaaggatctagcaggtctgatgcggtggctttgaggcttaggtcacctgactttagttgtggaggcctcaactcttctttgccaggtgcatagtctcttccctttaattcccttgccttccaaccttggagtcattttttaggggagaggagagggctgttgtttcatttggtcttgtcttctcctcatgtaggccaaggcctgcctctcctttccccatattggctccagaaactggccctccaggcagtttggcatttgggaaatgggctttggggtcaggcagagaaaggttcaaatcctgtttgtaatatgtgctgtgtgaccttagctacattcatcttgtgaacctcagtttctgcatctgtcaagtgctggtgttgttaacttacataattttttggaggattaagtgacagaatatacgttgaaggcatctgtagtaagcccctggcatacagttggcatttaataaatgttaatggtttctgcttgcaccttcctccctcatccttgtttctgagcctgttgccccggggggcgtgtccccatccgctcgttccctgcctgcctggccgtttagtactgtctttcccctgagcccatcatgggtacagtcgtggaagtgctcttcgttcgctttttctgcttcagctccccactgccttgctgcagggcccatgtggttccgcattgtgttggatgtggtctctcccccggccctcatggcccttcctaaagcgtcctaactccttctcacttcccattcttccctcttccaggcgcacggatttgtccacagcaggcagctggcagctatctctctcagcgcgtctactgtccccatgtcttcgtgcattctgttcttccttcctgtgggccctccccaccctgcccctggctccactgaatcatcctcctcctgcccatgtgtctcacctcagcccagagccctaacttccaggcatttctgcgtccggatctgcttgacactcacgtacactttttcttctgttttagggacttacaccttgtatcttcatgcttcccttcagctttgtacgctacttaaggttcagagtgtggcgggtttcatgaactatctgcctaccaggttggctacccttcccttgctttcttggtcttgattttttctgctttagcccaccactgccttactgcagagtgtggtgcgtcctgccctagacccctgtgtggtgctgggcacttctggggcagtgcacttctagcctgttggtaaagcgtctttgccctctcagccgcagtaagcgtcctttcttattgctctttccttgagtccagtgctgtagccagactcattttcttggtttgctttatgggcttgttgctttctgggctctgtggctttgtttgccccattctgtctacttggaataacccatctcccatcttcccagatcttccaaggtcccttccatgatgccatccccagctgttccccacctccagccagaagcagtcgtgccttttctgtgcccatgtttctttatttgaagctatctttgggtgcagtttttcttctgtgttacagttatttatggacttatctctcttacttgggaggcggggttacatggtggaaggaatttggacacgtacctactgctgatgtgatctggggcaagaaccataagctcttacagcctcagtatcctcatctgtaaaatgaaaatatttaacgctatctcggagaagctgtgaggctcaccttgaatacataccaccatagctaacatgtcatggggttagatcctgtccacgttatgtccagcacactgcctggcacattattggtgccaagaagtatttgttgagtgaatgatgcagcctgggatgccgatgaacagggacactcctctctccggacaagtccctcctgtggtaggaactgtttatgtcctaaggactcactggaggggacagccaggagcccctggctcgtattgtatccctcttccaggcggtgtgacccagtgtgagttagccagtgtctctgctgtgaatcacacatcagcagcattggtggggctggtggaagcggctgcagaaaagaaagggttgcttgcatactcatgtcaggtgggcccggtgtccccagttcagacaagagtgtgactgtgcaactgccctgcggagctggcggttccctggggaagctgactttggttccacctgagatgctgcttccaggtcccctgatctcatatggctgctccagaggctttgggagttgggtcctcttttcctagtttttcctttccatgcctgtcttactgggcactgaaggctgattgtgtcaaatgatttgtccctctgctagtcacttgccaatgcccttggaaaggatgatttgatgattaggcaggtgcgatgagtcatagtagtgttttaattcacccttgcagatagctcacggcctatattctgatatttctattcttttttttctttctgttgtccggcatactcctcacctccgtgctgagaggtcttgaaaataaaatagcacaaagggcttagtgaggctagaccatttcctgaattgtttggccactgttaaacaggccctgggggcctctggagtgacctggacttgttggggagttggggtcagagggctgggctggtggctctgggtcttcttacagattccagtagtggtttacatgttctgatgcctgaaaacagaactaggtgatgttttagaagagacattgaattagatgatgtgaggttttcctgctgctctattttgaaggttccatgaagaaagctgacagtgagaatgggtgtgccaggtctgtagagtagacccattttacagatgaccaagggttcaagcagcccacagcctggaagaacagtagttgctccagaaccctgggcgggggaggcgggggggaggcgagcattttttttcaaaaggcgcaggctgtggagaagtgagtccaggatctgggtaggggttgtggttgcccccctaaatgttgctgcccttgcactggcacattcctgctgttttcttctgctcagcggagccgaacggctctcacttcctggctagctctgtgtgctgccccaccccctcttggcgagcattgcctgtgtttgttattgtagtcctggctccaggccaggcctggctgcgagccagacttgtgggtacagtatgtacagtgagtgctgagccaagtttgtcatcatacaccattaattttttttttctaatctggttggggtggggtgaaggaggaggcaagaaaagagtttctccgatgcttgagaataggccgcattgaattccgcagagatgtcatttctgaaaggcagacggagctccggcttgttcttccttcgcagtttttcctcctttctctccctgtcgtcctcctctcctcttcatttccctatcacgcgaaatcagcctgcaggagatcgacaatgcaggtcttattttcagtgactagaatactaaatttacactgctaaatcagttttcattgtgttgaaattgacaatttgtttaattagaagtttgccctgtaggaggcccttctgagagacagtgccttccctttttctctctcccttactttctgttttaagggtttttaaaagagcctaaatggtagtagtgaatttcagtttaattgaagttttaatttcaattcgaatgtgtgaattaatcaagtgtttatgggctatacctgatgatcacaataagtttaaactaactatcaataaccaaactcattaactaatgagatgatctggccaggccctgcattctcagaggtggttttgggggtcagaagggtttgcgtgttggggaaagaggcttggggtgggaagagagatgacctccaaggctttgcaaagctagccctgatggagggtgaagcttgggtgtaggactgtggcccttccccttcctgtgtcccaggaagactctgaaacctccctcctcaccctctgctaccttaccccttttggggatctggcattgaagcatctgttgatccactgtctcttcgccactccttgtcgtaacacgagaagtgattcctagctctgaggtgtccatgcagagaccacagacacatgcagtgactcaaattggttctgagatgggccagtgtaaggtttcccattaggtagatttcccacagcttggcttaacgtcctggtggcttataagtgagcatgcctagaactgcttgtccctatttttgactcggctgcatacgattagggtttgagtattcatgtggcctgctcctattctgggagtgtcattcatttttggagccagaggatgtttaataagcacgaattgtgtgtcaggctctgtgcacttaacagtgaagactgctacaacatccctgccctcaaggagcttaagtctagagtgggagatgagtatgactatgcaatcatcatacaagatggtaatgtgtgcaaagtgctaagaaatctaggagaaattcagagtaggagagtgttttgtgccagagggtaacagaacagcattttgaaaggactcggtgaggggaagccgaagccacctatggaagtgggtggtgtaacctgcgagtgtaggctgggcctgcagggagagagcagagtgcagggtttagaagagatggacgagatacatctgtggaaggaatagcaaaatgatctgcattctccctgaagcactggagagccactgaaggactgagtaagagggtgacatatttttgtgtctggaatagaagggactgttgggcttttttttatgtagactaggctagaatataaggtgaataaagcctgttggagaacttgaagactggccgtctgtgttggggtgtggctggagtgttgagaggcctgtgccttctgtgctggttagggccctgtggccccattctgccaggtgggaggccccatccttccactcctctcttgcccttgtcaggcactgtaggccctggctgttgagaagcatccctgagatgaggctcttccccagagttagagccatggggaaagaatgaaggctttcgttgatagattttctgatttcagcagcagcatggagtggctggggcttatcacctgggacctgggtcatcctcctggcagggaaaagggctggaggagtccttcagattggatctcttaggctttcctctgtcgcggttggacggaagaagaaaagcattacaagatggcaaagatctgtggcttgtccttgttctgttttatttatttattcttttttggagcactgagctgtgggtttcagtttcttctcctcaaagacagagaagatgggggaagagaggtagctggaaaattccctgtgactgggaggagacagtgcgaggtggtccccacgctgatgatgggagaggtgcctttgagtccaaagatggcttcccctcatcttgtctctcctcccattcacctctctcctcccagattaggtatctgctcagagcaagagacttggggctgcccaggcttgtgagagcccatggccaatccatgcaccctctgcccactctccagtcaataccagctatcccttctggttagcttcctaccatcagggcaaacccgggagatgaccaggaagaaacttcgttcatgttccttgactccctccacattccttatgtgggggcgcctttggtttttgggtcaaggaagtggagaagatcagatgggggtggctcagaggccaggctgccctcccttcggtccgcatgggtgatgcggatgcagagagtggaaagggtgaagggagccactttcccccagctcgctcttgaacacacttctctttctctctctctccctactctgaatttggcttgcttcccgaactttttcccagagtggtgtcgtcactggcctgccggcaggtctggatgttctgccagcattccagagagtttatgatcgcttgcagatgcgcctccaagaacacactgtacccaaagcagaaattaatgcaggcttgactaccgtccaagcccgtacacgggagagaggaaaaggaaaacaaaaactgtttaatgctgtttataaattatacactggctgatgaaaaatacatttctttcctctccccttttactctcccccctatccgtcctcagtccccccccaaccccacccccaccccttctcgctttctgcctcaagagcctaaactgagaccagaagaatatggttttgctttttagctcctgttttggctgggatccgaaaccctgctgctgattcacagccagagtatttttcccctttacctgatgaaatatactgattttccagcccagatggggtgtttttggttttgttgtgtgggttgtttttgttttttttggtttttgttttttggccagggattttgtttacagcaagtatcaggttccatgatggtgctgggtgcgatgctggccccagggcagataaatcccccacgtaactgccaccttagtgctgcggttttgcgtgcctgggtcccccggtcctagtcaggccagctgaaccgagaaagttgggaaagttcattgcaggtcatggttttaaacagtgttttcaccagttctctcccaccccttcacctacagcccctgtgtgaagagggggttcacatgtccctgcccccaaatacacatgtctctgtctccatatggtgccttagcaggggttggggaagctcgttccatctacccctctggatcccagcatctcctcccaccccgcaaatcccccatcccaatttattctataaatttgtttccacattatgtctatccatttacatggcttttgtgttttttaatactgctaatgtttatcgtttgcccaacaggctcgacagattttgcttcctgtagagcatcgaggctttagagccccctcgttgctaagtagcagtctccctgtactgtaatgggctgattttgtattctgttcagcgctgtatcttatttttgtatgcaagacaaagtgttttgatggaggacgattgcggcagtgtctggaggctgtttggagttttatgggctgtacagtacactgtgtgctctctgaacagaacacaggctgttgaattttggattggatttgtcatttttcccccctcagagaggagcctgtcagatagaacattactttgagggtggagggaagaaagtggaaattatgtaataaccttcttccttctccctctctcgatgatttttctatctcagcatagggtggtttcttccacacaaaccctgtctcatgccaccacatgattttgcacagctagaggatgacggtcttattaggaaatgaatggtgccctagagggatggatgctgggacatctgtctgtctgccatttattctcctagtctccctttcctctcctttgctcctgccatccttcctacgttctgggttgccttgctggtccttgttattgtctgaggatgaatagatatggggttattggggagggatatttacgtgggatcaacctgataatggcaatgccatttctgatttccagggccttttcgtcttcccttggcttcgcagacacacaccctgccggaagcgttcttaggaggcctggccgtgctttctcttgccctcagccccattccctagccctctaaccaggctgggcctgggtatctgtatccagggctgtgcctgaggggccccaccctgctttgggcatccatcacgctactgcggcccttactttcagtgctcttgtccaggtctctgtggtggcaggtatttatttttcagctcttctcttctccttctatttctccccaatctgctttcatctcacttcatctctttgtccctgtcctttgtgtctgtgtcagcctcggccttttcttgacactcctgtgtattttctgtcttccttcttatgtcttcatctgtctttgtctccatctgtcttcgttggtcttttctctgtctctctctttctctgtctttgtctctgtctctgtctctccctgcctccctgcctccctgtcctaacccaccacctcaaagttttttttagcttggaagctgggcagtggttggaatggaaaacaaaatgtcactctggcccagaggtctccccagaggggaggactcttgagccagtgtccctagaatgctcccagcacctagaatctcatgtgctcttgtcccttgcctctcaggggccagagtggggcttctctggcttggcccctgcttttcccaggtccctggatgttccccccaaatcccagttgtgttgagaatgggcaagtagtttagcagggttaggctttacaaggcccttattggactttgctggtactgtgctctcctgggccagtactgtgcacctgagtgcaggactcagcagctgccctcacatactcatgccctagcaaagtgcctggtacataggagtgttgtgcactgatagtatctgtcaaataaatgaatatcctgttataaaagtgtttgtactactagggcagatctgggtttggtggggcctgaagcgtactcagttttgggtgctgtctctcagaaaaggattataaataccaggtgttagagcctctcccaggaaaggggtcagtgccagggagaggcctgaagcttcagctttactggcttccgggagaacaggcctgggtgaaccacttgagaggttgctgttgaggggtctcacttggaactacttagtggggtggctcagggctgaggataggagggtgtcatctgcccagctctggggaccttcagaacctgggacatctgtgctcacaggcctcaggtttatgttccatagaggtcaagcctttggcaaatggctgcaggtcgcaatgggcctggaaacatcatggtatttcacatgctcttctcagtgaggttgcttggtagggatggaccctgagttccagctcacccagagcaaccaggtaggcagccactcttggtagcatcctggcctccacactaaccctcggtgactgtcagtgaaatggcatggcattcactcctctcccaggtgttcaactgcctaggtctgtggctgtggctctcctgcgttcttggggcatagaactgcaagtatcgtggggcagaggactggtctacgtgtgtgtgtgtgtgtgtgtgtgtgtgtgtgtgtgtgtgtgtgtgtaaccatgagggagagggggcctggaggtgatggaaggtgtttgcagacatctgggcatctgttctgtggagcttgcagactcatccattaaatgaggttggtgaagattgcaggattggacagtcctttgggtagagggactcacttgttggagggtatggaaaagctgcagtgtctcctagaaatcggggacacagtcctaatcagaacaccatgtgtgcatgtgtgtgtttgtgtgtccaagcatgggaacaaaaagagattgagaagaagcatttacatgaaatactcaaatttgttcctttgctgtaatgggcccgcacagaccattaccttgaagatttaaaaactaaatgagctcatcatatcgagtgacttctaccgacattcatgcttgattgcaaagcctgctttacctttgaatttcaacttcattgtttgttattaattctcagatggtggtggtgtgtttctaccttttggattcagccatgaaaatgttgattttgtgtgatggatgtgaacatttctcaacaagaccccactgaagaaccttttcattttaaaaatagccccatgacctttggggctcagactggagtttccgaggaatccagtgggctgaggcaaggcttgggttgactttggagggggcagaagtttgcatttttttgtctaataatttgagtttcatatgaatgattctgtgctccgtgcaatactatgcattttcataactgtctctttcactttgggtaaaggaagggagggaaaaaataacagcagcagcattctgtgggcaaaggaagaaaacaagagaatggggcagagaacaggctaaatttaaaattgtaattggctgacttccactggcttgcgggtgttttaatgactcataataacttcatttaaaaccagctgagcagaaaatagattggagaggagcctcgggccattatggatttgtggtttttttttttttgtttttttttttttttttttttgacaagcttggttttcagcagccaggaaggctctcagagagggcttggctgtgttttctctctctctctctctctctgagggttggtggtctgcccaggagagattgtatagaaaccagggcgagtttttttgtttttttttttttttaaattctccctctaccccttgcttttttttttttaactgattaaaaatagatgccttgaggtattattttagcatcagtaggatttttttcacctttgatgtggtaaatggaacataaataaaattgtttttgaaattactgaattaattaggtagtaaagcaaccacaatgcataaatgtccttggccgtctggtttttctccctaaccctgatctatatttgtagggcgttcccttttctccccagccccctcctgctctcccagcgacccctccttcctctgagcctgcaccttccctttgaatggcaagattcttttatcatcccggcaacagctaaatgattttttaaaatccataggattttgacagtattggttctatctggttatctgatcagctccaggagttttgggacttgccagaaaaggctctaacctggctctagttgttttaaataggtcctgcctgtttcccatgctaggcctggtgcccgaccggcgagcgttcctttttctcttctcttttgaaaagtcagccgactcagccctaggatgtgtctgtctgggcaggacaagaggccgccctccatctgatcgctcttagccatttatctatcccctcttatggcacctgtcaccttctttgttacatagctatttatttgcttggccttttttgcctactagactgtaagcttcttgagaacatgtgatttatttgtgtcccctatactacctcgcttagtaacctgaatggtggttataactcagtcatttgaaaaataacctaatgggtgagtgagcaggcatgcggatgggcacatggtaaggaacagacctgaggtgctgcctgcttccctccagccccaggagtcagcaatctggatgagaagacaaggatggaaggcggggaccttgtcagtagtgtgctctgttgcatcctcacagcgggacacatagcaggctctcaggaaatatctgttgaagaagtgaagggctcaggatgcatggtttggctgcaggaaggagagaaagacatttattgaaacttgctgtgttccaggcacagtgctatgtgttctgcatatctgaactcagtctttcttcaactttggaagacagatatgctgattccgttttgcagatgaggacagtaaagagttaacttgcctaagatcataaagctagaaagtagcagagctggacttcaatctccctctctttctctctccttccaccctgtgtcttgcttttctattatagtatagcatgctgctatacctagccctggcctcgtgctgtttgagtgcctaaatgcctgcttctctgtttgtagagctaaccaatctcaaactggggagctgagaccaggaaggccctgtgcccaagggtcctgggggtggggagggtggcatagtaattggctgctgcctgtgtgccttgcacctgtgccaccaggagcaggtgtggcttattagcctcttcctgctctgccagaggagcatgtgttcagtggttgtgagttgtggctatgacttctgctcagtgccttgtagggttggggataggagggttctgggagccttgcaggagggtctgtgggttagtgtgtggccctcccacccagggagagcttgactgtgtcatgccccccactcctcctttgcactatcctgccaagtaggaggggtaggaggagagagctgcctgtggtccctcctgcatggcgacgcaactgggtgctctgcttctggtagatgcaccctgtgatgctggggtggggtgaaaggggcagccgacctgtgctgcagcccagaaatgtgagagctgtgaccacttgggctattactagcgccttagacttcaagcgtcttggagtatgatgcatcaggaaggttgggcctccctgacctttcagattatgtccagtgaagctggaccacttgacatgaggctggttgtgtccattctctgacagcctcatcttccccaggcacgcgctggggatgctggagctttctctggggagcgaaacatcagccaaatgggaaccagatggtgaaggttgagcagcagagaaacctcgatgactactctgggtcacacgtgtggccctcttttgcaggaaatcgtttgtgaagtcattcatcagttagcaactgaacctagggccagtggtgtgcaaagcttggcagggtggacagaggggttgaagccagtgtccttgtctgcaagaagctggtggtctggctgagagggtgacacgagccccctggcaagagaaggcgttgagcaaggctgggtgtgctcattgtgaccgcaagaggaaagactgagtgctgcaggcatttagagtggggagaagctcctaagaaccaggggaatgaggagagcttcgggaaggaggttcatgggattttgatgaggtctttgctgctggagtatccagaaggagtgctgtggtgggagtggcctacctttctggacaagaggaagcaagaacttctgtgagctagaaccatccaggcaggcatctctttcctcctcatcctcctccgcccatagccacctggcagagacttagagcccagtttcttgcacttgggagtcctccaatccctgtgatggctgtgggcctccttggcctggaggttgagaaacactgcattaaagatgaaaagctgccacttcagggggcccctccaagttgaggcatccataaaacaaacacatgtgaaagcaaggcttaaaattggatgcggacccagaagattgtaaatttctcatataggatttgatggactaaaaaatatgttacgagtacctagaaccccacaaagcctaggttgagaagacaggtcagagggctgcctctgggtgaggctgaggacagagttggccaccctggagggccaatggaggaagcatccgaggacggtctcaggacgtgccccagcccacctcctcggaccacgtgggtgaagcccctgtgtatgcctttagtgaagactgagcttgttcaccgcgtagatggaagccagtgggagagaggggcggatacctctgtagtcaggggctccttttgttggctctctccaggattcaacctgacaaagacatgtcttccagacttttccccagtagttaacgcactccctcctccttcccccaaaccagtcccgttttgattggaattctttcacttgcctgggacaaggggaaaaaaaaaaaagcaaattctaaagttttcattaggtagttgggataaaaagtcttctggggtagttggattaaacttcagcagctctcttactgactattataagctaattgagcacagggagctcattggcggctgcatttttgttggagtaattatgaaagaccacagtcattttcagtaacaaggtaactccgggtaaagacagaactctctgaaactttggatttgctggagtcttccttcctcagttgcctttgctaatatgagcccgggataaaggcccagagaccagatattttgggaggctactatcttgcctgaatatcccggatctcccagtgccttcattggggcctaatggacataatccagcacatctgagagagcactgctggggggccagttttgcattaattgagatttggggtctggagtcagaagctctggagtataggctcgagagggacaggtgcagcctttgaagctgacccgggagcaaagagaatcacagtgcactgtcttcattacttatttatgcaccaagagcagggtctgattatagataatgaggccgaatgatactctctgtctctaatgaggtcctgtctgtcctgtccgagcaaagcgtggaccagcgtatgtaggactgtgatgacaaccctggggatcttttctagcccataggattcttgatggggaaacattcctagacatacagtcctcccactgaactccacccccatccagaatctctatcaggagctaggagccggctcagtgggctgggaagggcctttcagtgccctttggacggggccctggggccttgccaagctgaacgtgtcctctgggtggcctgcctcacctctggcctgctgcccatcagcattgaatcatgcccctcagaggacagcatgtaactgtgcttcccgatatagcccccggccccccaaggtgacaggaagagtcattgtcacgggagtactccatctttctgacaccacaaggccggcgtggctttcttccctactgctcagccctgcacagcctagaattctgctttgggagcatacatagagttcacagagctatttttttttcctactctccgtctcccactttagttttcagaactttatctcagtctctggcacggactatctgcttccttcctccatctcaacattataaaagtttgtcacagtcagaggctggctgaatcgaagcagaaatgtggtgtttggttaaattgtaaaattagctaggaaagttaatgaggcgttccgcctctgcctgctgaagagcaggacgtttatgaaggtgcttcaaagcaccctgcctgagaaggaaggaaagggagacaggagcagcaggggaagctgcccaggagtgtagaagagcctggtccaggtgagtttccaggccttggacgtgcctttcactcgcttagctgaatggaacctgagaaatcatcccctcaatcctcctgctgtgggtccagctccatctacccactccgagtccataggagttccctactacatgtccaagaatgtcctgcgaccgcacacagctggccatggttagccattctagtgcccagatttcctttttgtcctgggcaaggcagaagagacaaaaactgaacactttgccttagaaggagcccatggtagaaaggaggaaaccagagataatgacagtggcagctgacatttcctggaggcctacaggtgccaggtactgtgccagattgctttacttcgtcatctcatttgagcctcacaagacccatttcaagttggtactgttaggacatccattttacagatgaggagactgagtttacttgcccaagatcacctagcaagtaagagacagagctgcgctgtgaccccagggctgcctgaccctgaagcccctggtcttaacctctgcggcaaagttgtttccatcccctttccaggctgcccatttctcccagcccacagctcacgtggtacagattgcacgtttgcagatgctcaccctgaagctttggaagtcacggtctcaaaggtgcacgtggaagagctgccaacagtctatttcctgcacacaccaaactcgcaggtcttctaattacaccaaacaaacctttctgttttcaagcagctatgggcttaatatggcaaatagtttcccacctggacctctggcatgggaggagccagaaaagacgagttttgttttgttttggtttgtttttttccggcagggaggtggttcgtacttagaataggcattaagtgtggcaggcaatatttctgttttgaaaagtgtggcatcttaaggctgctgaattttgagcctgcaaatgtcagtgccgtagttgtaatgtaacacctcaattatggtgcagggggtaaggaagccagactctgaaacctgcaaggctctttagatccacagcctgagccacaattaaggtttcagaaacaccaaaggcaagccaatgagtgtcatttttaaccagtttgaacattttactacttcctaacatcagaagcacccgggctagagagcccgcttcttgtcctcaataaagtgattaagctgaatgggtgttggggagtattattaggctgagaagggctaaaaatagacatgctctgttttctaaaagccacagcaggcctggagagactggcagcatcgaggtgccactgaggggcccaggggaggggaagggagggtggcagtctctggagctccgtgtctgagatggggatggtgggtgttgtgacgggtgggtcaggtggtggggcctctttcccagctgtcaccaagagtggaatcacagtggaagcacatccgtacccgtatatgtgtattaatgactttaaaggaactgacaactctggagtctctaggagggatgcctaggcctaaaatttacgtactcagccccaagataattgaatttacctgctgttctgggagaaggagtccaatctgggcagtgagtaaagggcagactataaggggcacaagaagagggacatggggaagagcagaggcctttacagccgagagtgaggatctgctcgacaagccttgattaactaggatgctcagagaagatgtaatcaaaggactttttggtgaactgaaggttaaccaggaaaccttgtctatatcggcctttgtcgtttgctatcattcatcaatgtgagagtccatttttctactttcagtgaatgcaactgattgtctttttatgatagaacatcttgcttgcttagaagtcaaaaggagaatgcctaagaagggagttaagcatggaggtatatgcctagagttttattataagtcactctagaagatcgtttgtacgttttccttcctacatgttttcatacctttgaactcattcctctctataatagctttaagtgctgggaggggcaaggaacatgacttccactttgtagatggagaaacaggccaagaaaagtaggatcttagaatacactgaggtctacgcagaggcaagtctagaccctgtgctgctcccagcccaggctctgtcggatagacagtgttgtttcgtgcctggaccaggaggtgagagtttttcttaataggcaaaggactcagagaagagagttaggtgggcttcccatgctgccattctgactgaggttttttttttttttcttttatgtttactagctatgagaccttgggcaagagaactaagctttttaaacttcagtttgcatatctaaggccaggcatggtgtctcctgcctgtaatcccagtactctgggaagccaaggtgggcggatcacctgagatcagaagttcgagaccagcctgcctaacatggtgaaactccatctctgctaaaaatacaacaattagccgggcgtggtggcatgagcctcctagcatctctctccaatgccacttgcaactgtctttgtagtgtgtatgtgtgtattttgtttctaagataaaacatctctaggtaatatttcaacaaatgaaagaaataaagccttttagaaggctcctgatgctgtcacaaatgtgataatcattgcactcttcaagaaaccaattggcagagctctgtatgcaagttatctgctgacaattggctgtaagctgtacaagccctgtagatgagagcttctcttttcctggaaactccaccaggaagccgtgccatagaccccaaagacatccaggtcaagctgcagggaagaggcagggttcagtaggcatagaaggctgtctaagctgggcccgtgctcccatcacaggcagtttagtggagaacctgggctggatgttgacagaactgagatgttagctcagctacccactagctaaatcaggagcgttagcagcttaactctctgagccttggtttcttcacctgttaaagagatgatgatacatccttcctatcctaaaagcaggacttcaaagttgcacaacagcagtgacaccactcactcagaaatgggactgtaaggttgttgaaggtttaaacaagatgatgcacatgaaggtgcccagcacagaaagtggagctcaacaggcacacaacaccaatactttcactccttcccttccaaggaacctacaaaggctgccctgcaataaggagtcacaatgctgctgctgccatagtgttgacagtcatcacaataaaaatactaataacatgtgttgcccattcattatgatgcaagcattgtgctaactactttacatgcaatataccagttaattctcccaacaactctaagattaccccccattttatacatgtgcaaactttttttttttttggagacagagtctctttctgttgcccaggctggagtgcagtggcgtgatttcagctcaacgcaacctcctctcccgggttcaaatgattctcctgcctcagcctcccgagtagctgggagaggacaggggattctgagacccaagcaatgaaggaattatcaatattgagatgccaaagagatctcagcattgtgagaggactcggcattctcttcagtcagtgggaaatgagggaggcagggaccagcctggagaaagtgagggaagccaagaatgccatcgagactgaggaatgctgcctcctattccctttaaaatacctccaatgaggtatgtcatttggcaggagtgtcaggagatgctgggggaccggggcagggccaggttatcagcttgaaatgggtggagtaggcacttggatcccggccaccacccttggaggggtcttagtcttcttttttccattgcccagccagtattgtgaatcctactcaggggagaggggtgtgtgtgtgtgtgtgtgtgcgtgcgtgtgtgtgtgtgtgtgtatgtgtgaaatcctccatgccatatttagggtgggggcctgtgacggagcattctgaagttgcttcagaagaaaggagcagaatagatgaggatgagaggagaccgaaggctcagatcacaggctgagctttgggactgctgggggccaacagaaacttctcttttcattctgaacttctctcctgagaatccccaaggggagacctgggaggagggtgattgttggtgtttaggagttgcggagatgtcccataaaatcatggcagaaacccttactcttatatccctggctttattatccagcctctcacaaatgccaaggttgcaaagctatctatctctcttaaacaaaacaaagttatgaacacttgaaagcccaggtattccctggaactcgggtcagtctttggcacagccgcactgacccagcctgactctggctaatgattctcccaatgtctggactctctgttccattctacctgcctgatagagcagaatattcaccttgagaaggattctgctggctgaaccggggaacccagccctcgcttggtctcaacagcaccttccaaacaccaagggttgtatgcatttgagctctcgtgtacggccacgtttaactttctttgccatgagcgcccagcttctcatgaacacctgttcatcctttctcccttagagatgtcccagtttaaaacttgtcatttcaagatggagagataaagggattcaccaagggttacacagctcaggcagtgacagtcaggaccgcaagtcagtttcttttggtactttggaaaatcttgggtgcgctggccagcagaaccctccttgagccaattatctaccctgtcttacctaagggtggtcctgtctcccattccagatagcataatatcatgtatacgagagccttagagaacatagtgtctcatttatgcaggccatttacttattgcgattgggcttctcccagagctgtgggactggaaatactatgggctgcataccctgtaggctgtggccaggagctgtcctcctggagctcatcagcttgatgaagtgaaattattctataatcatgataatgactgtgacttgagcacctgctatgtgccaggtacttcatatagtttcttgtttaagctatcatatgaggatgaatagctacattttcaggagggaagtgaggctgcgaagttgatgctggtaccgtaccggtagaaccttaaagccgtctctggatttgagctgttgctgttgccaggctggagtgcagtggtgcgatctcggctcaccacaacctctgcctccggggttctagcgattctcctgccccaggctcccgagtagctgggattacaggcatgtgccaccatgcccggctaattttgtatttttagtagagatggggcttcttcatgttggtcaggctggtctccaactccagacctcaggtgatccgcccgcctcggcctgccaaagtgctgggtaattacaggcatgagccaccgcacccggcccgggacttcattttgagggggcctgaccgttaacctccgagagatctctcagttggcaaagcatgtctggaaggaagtctggttcatcacagcagggactgacattcctgtagtaagagagattttgtgcccttgtgctgactaccacaataccatgattgctcagtcatagaagttgccaggagaagaaagagattagaagcaatggtaaggtgaacccctgagtcactactcttagacttcaggaatatttgtaattttttttggagacagagtatcactccgtcacccaggctggggttacaggcacaagctattgcacctggcctgtatttttaaaaaatctgcaacaaatttactatcctacttgcattttatttaaaataattcactcatgtatttttaaaaacataaatcatctcaaactggtttgcattccctggttcccttctgggtaggcagtaggagggtaataataccattaaacattggccatgagtgatgatgggagcagacggtaggggtgtcatttccttgatctcctcctggggaagaatgatctgaccccatctttactggtgtgttttggctggagaggtaagaatattttaaattgcgtgatatatctcttgcatgcatttgatgtttgtgtgtgtcttataccttgctattattttatctcctgatgacaatgatgatgttggtcttaatgacaactagcatttattgggctattattgtatgccagacagggtattaaacactttacatatattatttaaattaatcatccctcaaccaaccctgtggcataaacactctgagcccagttttctaggtaagaaacaggcccagaagagataattcacttcttcagggtggtagctagacatggtagaactgggacttgaaccagagtttgtttgattccagagagcgtgctcttcactaccttactgtgcagcttaatattgagtgcatgtgtgtgttctggctgtggacagtgtttctaagcctgttggattacccgctggtgctaaaaggggtaacaaaagagctttccaagccactctggctgagaattgagttgcagggataagggacaaggtagacctgtgtgctccctgtgggacttgagagagggactgcaggatcccagtaagagacaagggcaccatgcagcttcctagtagcatcacatttattaggtaggataagaaatgttccctcagccatagagatgtctcagcatttcctcctgacccagtccagggtttcctcttctgcagagtggatatttagccacacatgaggtgtcagtcatttgccaggtcactggtgggacactggcttttggagatctaaaaaccacctgtcctcaatcccaggtgactcccgttgttctgttgctcagcccaggagaattccctggtgtctttctccatcctatatttatgtggggtcctgtatcattagttcattcaccctcccatcttgtagtgagtgaggccgaactctgaggatctttccccacagccttgtcaaccacagctacccttgaaccatatcctggacctatcaatggggctggttgttttcctttcagccaggatttgctcacctgctttcccttttccctcttccctgaatctgtgtatcttccagaaactctggttctggatcagctttttgttttgttgacaaaggagaaagagcaagagagagagctagagagagagagagagagagagagagccttcaagctcctctctgggagtacacatctccttgagggaaagaacacacagtgccggcctttggaattggcagccagtgtgctgttctccgtctgataagaggtactgtaaataaaactgtacaccatggcctgttgtaaaatgccctgcgtctgtactcattgttctgacagcttatgctttttttgggtctgctgttttggtacactctgtacttccttatgtaagcaggcgtgcagatctcatcagaacattcaagatgtttattttaaaatctcaaggaattttgaaaaaaaggacacaccactcaacattagatgctggcaaacattaggtgttttttcagtggttcttttttttctcccttcttattattagcatgggggtgggagaggctttggagagggagggatttgaatttttttttcttccctcattggcttctgccttatttccttcagagagacaccaccccatatctgattgcattcagtgtcttctgcttccttcctggatgccgggaccccctcagcctcatttctggttagggcaggtagggagggaggttctttgacaagggggagagggcagctgcagggagcttgacatggcttccactggatttcagctttattgtcattgggatcctgggcatttagagaaagctttatgtttttgaaagtgccctgctggctgttccctcctttgattcctgtgagttggggtgatccttggcacagagggagagctgctcccacacacggaggcctcagtcccgcctctggcatgtgcgtcctgtctttccaccgaactttaactggctttgaaccttcctccttcctttatccccaaccttctggaggtgtcgggaagtcagggaaaaaggggagaagagtaggagtctggagaacccaaaatggtcagggagctccctacagggtggtgcttagaacatcccgaagccctcatctgcagggtacctgggagactggtaggggcaaggatgtccgcctgtctctttcacaactgggtacctggaatctcagataaactcagtgcctggggtagggagtagtcactcggcagatcactgcctggggggcaggaggctcactgactgtagcggagggaagggttgtttgttggctgccacagtgagcattggattgggttgggagcagacatgctgatgagagggagatctcacaccagaagaagcagacagccccacttcctaacctttcctcccttttcctctcaactacctgagacctagccagagaccatgtccttgagttttaaatagggggtagtagagaacggagtgtgcagaataaggactctgccaccccctaggggacagacagcttggcagtgccctgagtggccattgcgcccttcccaggtgagttctgcacccaggaacctgcctgggactttctttgtttaacaagcatttagtgggcacagactgtatgccaggcatggcgcagggtatcagggatatggtaaagcccaagacaggtgggaacctgctctcacagagcttacagtccactgggaagatggaagagagctccaaatacaggacagttgaatggggctccaggggcttgtccagagaagatttcagagccaggttggtgaatagctgctgatactgacatattggttcgatggcagatttttctgctcccctcaacaaaacaatcactcatctttaaattagaggaacaaggtggggtgtgcatgtgtgcgttcatgtatgtgcacgtgtggtactgtgtgtctttatgaatgtgagactcactttacacaagataaatggcccccaaataactgtacatccaattccagtaaaatcagtcatactttaatcgcatgaagggagctctttctttaaaggaaaagtgactggagaagatggtagctgcgacttactggttctgtatatctacccaccagctgtaggatggagcactttccccaccttgtcgcaactctccaagggacctccccttactgcttccattttacagctgaggcaacaggctccctgagactggcagcttgctgagggtcacagctggcgactagcttgcctgggatttgacctctgatctgtctgacccaaatgttgagttcttaaccacactgcactgcctcctgaggtataaatggcaccaaggacctctgctatccacagaatgttttgtgattgacaaggagttttgtattcacttatgtctattatcctgtttgctcctcacagcagcctcagggaggcagacagataggcttatgcccattttacagattgggaaatcagttcatcaaggtgtgatgactagtgtgatgcccacagctgtgagtggccaagttaggcgtgggatctcgtgcctgcacctctagatcctgctattgttctcggtttgcttggatctgtgattgctgtggttagcaagggtctagcgcactttatcttctgctattctccctctgctatttaatttctttcccgcaatctatcccttaacttcccccagccccgcatctcccacctccatgtcactccatcccgtgcagctggcctccttgctcctcttgccttgcctggcgagggtgttctcacgtggtggccttgctctatgcagatgtcagtgcatcagcaagggcctccctgactacgctgtgtaaaagaacagcccctggcactctctgtttatctttactcaatgctttgttgttgttattgttgttgttttgagacagggtttcactcctgtttcccaggctggagtgcaatggtgtgatctcagctcactgcaacctctgccttccgggctcaagctattctcctgcctcagcttcctgagtagctgggattttaaatcagccaccatgcctggccaatttttgtatttttagtagagatggggtttcaccatgttggccagcttagtcttgaactcctgagctcaagtgatctacccatcccggcctcccaaagtgctgggattacaggcgtgagccattgtgtccggccctcttcatttaatttatttctctttttatcacttatcaccacctggcctgttttgtatttactcgctctttaaaaatctgccctcccatcttgaacataaactccctgagggcagggatttcgtctcttttgtttatttcctgtaatccacctctcggcatatagctactggacattcaaaaaccagcccccgtgtgtaggaaggatatggcaagtcatggccatcccagagctgtgtccctggagttctccctactccaggttgagccccaggaaattttgtgggtgtaaatgctgctgctaggtccatgcgcacccgctgtgttcagctggcgtgaccttcttccctcccacttcgccccctcccattgatgctttataaatgtattagtggctgcatgatgtcaccgtaatgcattttgggaatagccatgtggtttatacacacttgagttgctttgaatgcaaacctgacatcatactgaaggcagcagtgaacaacatatgcacagtaaacaggcagagactgtcttattgattaacagatgaggcctctattatcgatcaaagcttggcgaggaaatttatcacttttaatttcagggctgccaaatatttctgcctctgagccagccattacagagaccatttaaaggcacaagcctcctcaggagagaggattttgtctgtctcgcttggctccgctcacgtgtccatggaactgcctgtctttgctctcaccctggagagctgggggggaagtcagagcctgtccgggtgggcgtgggagtactggggcttcgtgagtgggggctagcaatgggagctgacgtttgtgttatccacgtgtaaggagggacctggcccagagtcactgaggacaggggctttcacatgctcagctcagtgtcgtgacttcagcgaggtgggggtggagtggcgggactttgaaggcaagcagatgtggtcaggcttgggccgaggcagccgcctttactgatcatgtgtgcttatctgtcttcatcttcctctgcacttgtctgatggtacacatccggccctttatttcctacctggcctccttcctttctctctgcttctcagtcattaaagcgagaagctcctctagcccacagtgatggctgttttctaagaaccctccgcgccacatcccttggaagcctgtggcatggtgggcttctcgccgattggagtgccctccccttcccagctggtgcttccctcctcgggcctttgcttcccctttctcctttagggagctgtgagagcggatagaacccaaggaagaaatacaattaaaatcagattccttacagatccacagaaaatcattgatggctgatgatttgggactgggggcagtttctaattgtgagggagctgtgacttcatccagccccagctttcccatccaggcccactctgctcttggaggtgctttctgcatttccagtgtaaatggatgaaaggtagtcttggctgctacccctgtgaacacatgtcatgactgctttgctgtcactgggggctagaagttttcttggctctttcttcaaagctctcttaagccgtgtaccaggtgcttggcctgaggatgccctgtggcgtgaagggacacccagaggtcaccatgggattctccctgcctccaggtgaaattcaaccccagccacctaaggcaaatgacaatatttatttttaaagctcttcagtaaaagtgagttcatatcttccatggggtactttatcacccacttatccagccagtcgactcacatttattgagcacctactagagtatatcctgctcatcagtagaagataggtgtcagtgagatagagaaagtcgatacccccagaggaccccacattctagacctcctctagggtcctcatattcttcactgcaagaagcattcattggtattgaagtctgtgctggaacagcttgtatttggagttacattccttcagtatgtgctgattctccaaggcagaggttttcaaatttctagaaaagtagtggagtcatttttccaaccccaaagctctgatgtgtaaaataggtaaattgaattttcattcagagatgggagctcagaccccacccatggagtcttatccacaaaacatctttgcagatggaaccccagggaggccgaagggtacggggattactctgaaatcaggctctgaaatcaggctgcctgtgtttgaattcacctttactatgtcaaccactgtgtggcattgggcaaagtgcttaacctctctgagcttgaatttactcatctgctacctggaggtaatgctagcatgtactataaatggtggttgttgggacaaaccatacatactaagcatttagtgtcatgcctggcatatagtcaagcctcaggaaatctgaggtgatttgaaacagcactgtgggctacaaatttgtgtaacaagtagttctggctcgtacgaggctccaatacaaaactaaaacacaggcatatttaaagaagagctaagatgaccagacacagtggctcacacctggaatcccccagcactttgggagaccaaggtgggaggatcgcttgagcccaggagctcaagaccaacctgggaaacacagtgagacctcatctctttaaaataaataaataaataaaataaaataaaataaacaaaaaaacagaattagtcaggcatggtggcgtgcacctgttgtcccagctactcaggaggctgaggtgggaggatcgcttgaaactaggaggttgaggctgccattaagctatgactgcaccactgtactccagccttggtgacagacagagaccctatctcaaaaacaatgacaacaacaacaaagcgctaagacgtgttgaaaggaacagagtgcagtggcagattggaaaggacagaagagtaacggacttgagtgcttgatgtccacaaactgtggccttgaaaatgaagtgggattcgaacagatggaagaatgggactgagcattgctcaggcacagagactctgggaaggtaagtggtgcccagagagggccggtgaggacagcttacctatggaggtgggtggctaactgggacaggttatggaaggccttgaagccaagtagaggaatttagaatcagtacacattgggaggcgttgtatcttcttgagtaagaacgtgtgaggaatcaggtggctgtagaggaacctgcatctgttgagtagattgcgggtggctggtggtgtggaaaccaccttgcgtcttacagtgttctgagtgtgacgcagcaagggcctgaatggggtggtgattgcagtggaatcactgcacccaacgcagtggaagaatgcatctaccagacatcttgaaggaaaaatgccaagacttgtgacagctgacccctggatcagataatatagtagagccatgaagactattagccagtgataaaaagtactgtttcatcttgacatggtggcattatcactttaagccttctaaataacagttctgagaaagtttattaaattgagttgcactgaattaattttatttattccacaaatatgtatagtaataggtttccagtgtgtgtcaggcagatgcagctgtgcacaagatgacacagtccctcctccagggagcttacggtgtggtgagagagaaagacagggccataggcatttaaaatggagcacataaagggctcgagagctggaacatatcaggtgctatgggagcataaaggagcattgcctcacctacagttgggggcccgggtattgaagttgatgtatgaatgacgaacaggagctccaactgcaccatagcagccagagaagcatgggagaatgtcagaggcagaggacatgcagaagaatatgcacaggcctagcaatgaggaagaacatgggtcctccaggcagcccgcgtggttcagtgtagctggagaaaagagagcaagagtgaggtgtgagagacgaagcaggaaagaggagcacacccagaaatgctttgtgagtcacagtaaggagtttggaccttgttctccaggcacaggggagccattcaggggttttaaatggtcagatgcaggtggcagttgggggacagacgatgagtttagttttggacacactgagtcagaggtccccatggacatccaggttgaggtatgtcagcaattcttacattcccataaagtacagtttaggcaacagggcacatttccctgtgttggtatcatttttctcctgtctccccatcacctggagctaggtcttcagatcctccttcttcttgaggtatctaacttggaacccatttctgtttatcttggttgttctgattttgtttctccttctctctagaagagccctagacaagggcattcagaattcagttgggtgaatgctcacctcttggaggagggtctgagccatggatgatccctcactcaggatttttgcgggtgtccagtccccttccctagtgtctacctgcacagttgtggcccaggacctccccgctcaccagtggactattgctctagtggtaactgcctctcctttctttcagcgggtgccaaagcctttgtctgtgatcagtgcggtgcacagttttcgaaggaggatgccctggagacacacaggcagacccatactggtgagttgacttggattcctgttctccaggttttccacagtgttggtagcacatggacatgaactgtctgggtggcaacctctttttagcaaatgtgacatccagtaatttcctgggcgagctgtgagtaggatgggcttctgccacgttcagctactcttgtctgtgtggctggcccagcaggagtttacaagtatgacatggccccatgagaatggctgtcctagattaggccaagatctgtctctaaccagccactgagagctcatgttcttggaggtatctagtatgctcttgttgaggccttagtctgtgttgttatcaaaacatcttcttcccttggtcaggaaatctctcacacccatctgatgaaactgaaaccctcgtgtggccacagttggctggtcttccctctgcgagagctgagacattgtctaaaatcagcgtgtacgcaggatgcatttgaacaatattaactcacgatgatagagctttatttgatttcaaagggattgatttcaccgcaccaaagtcatctgatcattgtgatcagagtcgttgtcatcacatcatcacagcagctcacacttaacactcacagtgaggcaggcactgttctcagtgctttatgtcaggggtccccaaccctgggatcatggactggtgtctgtggtggtctgttaggaaccaggctgcatggcaagaggcaagcggtgggcaggcaagtgaaacttcatctgtatttactgctgttcctcattgcttgtattaccacctgagctcctcctcatgtcagagcagcagcagcagcagcagcattagattctcataggagcacaaatcctattgtgaactgtgtatgcaagggatcaaggttgcatgctccttatgagaatctaatgcctgatgatctgtcactgtctcttgtcacccccagatgggaccatctagttgcaggaaaacaagctcagggctcccactaattctacattatgtgagttgtataattagttcattatatattataatgtaataatagaaataaagtacacaataaatgtaatgtgcttaaatcatcccaggaccaccctcctgtactccgctgtatgtgaaaaggttgtcttccataaaactggtccctggtgcctaaaaggttggggaccactgctttacgtgatcccatctggccaatctctcagtagccctgtaaggtaaggttggaagctactcttatgtcatagatgaggaaactgaggctgaaaggagggaaagtgacttgctggagttggtagtggggacaggcgtggtagagtcttatagttcagagctgagactgcatgggtttaatcctgactctgccacttcctatttgtggggccatggataaattatttaaactctcttaatttagatttctcatctgttagaaaagtggagtaatattagtgtctacctcatagcattagggttgttgtggggatgaaataaggtattttatttgaagtatttcatggagtgtttggctcatagtaagcactcaataaatagtagtaggtatatttaatgtaatagatatttattgagtttctacaaggtgctggcactgtttaggcatttaagatgtagtaatgcatgagacagacgacattgctgcctctcatggaactgagcttctagctgggagacagaatcagcaaataaatatacgatatcatgtctgcttatgcatattaagtgctactggaaaaggataaggagtagagaataatagggagaaaagaaatattgtggatatttagggagaaatgttgtggataaaatggttagggaaggcctctccaagaaggtggtatctgggcagagtcttaaaaagtgaaggagtgagccactcaaaaatttctgggaagaatgtctaagcaaagggagtgagcatttgcagaagccctgaggctggatcaagcctgacaagtttaaggacccacacgcagagcagtggtggccagagagctgggagtgacgtgtagagagtggtgagggatgaggacaggatctgtcaagtctctcagccctggtaaaagatttgggttttactctgcatgtgctgagtcctttggagggtgacaaaatatttgcaaatcatatatttgatgaggaacttatagctagaaatagaaagaggtcttataattcaaaaaacataaacaaataatcaaattaaataatgggcaaaggttctgaacagacatgtctccaaagatagacaaatagccaatgagcacatgaaaaagatgctcaactgcattcaccatcagagagatgcaaatcaaaaccacagtgagatactgcttcacacccactacaatgtggctacaataaaaaatacagatagttacaagtgttatcaaagatgtggaaaaaccagaactctcatgggagtgtaaaatggtgtagccactttggaaaacattctggcaattcctcaagaggttagctgaggcaggcagatcacgaggtcaggagatcgagaccatcctggccaacatggtgaaaccccgtctctactaaaaaaatacaaaaattagctgggcgtggtggcatgtgcttgtaatctcagctacttgggaggctgaggcaggagaatcacttgaaccagggagtcggaagttgcagtgagctgagattgagccactgcactccagcctggcgtcagagtgagactccgtctcaaaaaaaaaaaaaaaggttaaacacagaattgtcatacgatgcagcagttcttcttttaggtatacagccaagagaagtgagaatatatgttcacacaagaacctgtacgtgaatgtttatagcagcattattcataatagccaaaaaatggaaacaacccaatgtctatcaactggtgaatggataaacaaagtgtggtatattcataccatggtatactatttggccttaaaaaggaatgaagtactgatacatactacaacacagatgaacttgaacatgctccatgaaagaagccagatgcaaaatgattctgttcatgtaaaatatctagaataggcaaatctatagagacagaaagtaaattagtaggtgccaggggctggggaagttgcgaggaaattgagagcgactgccgatggagctggagtttcttcatggagtgatgaaaatgttctaaaattgattgtggtgatgactgcacaccttcgaatactgaggctcctcgacttacaatgggactgtgtcctgataaacccatcataagtagaaaagataataaactgaaaatgcatttaatccaactgacctactgaacatcatagcttagcctagcctaccttaaatgtgctcagaacacttacattagccaacagtcgggtaaaatcatctaatataaaacctattttataataaaattgttgaagatctcatggaatttattatatcctgtacattacttcaaaactgtgatggtttcccacaattataaacttgaaaaatcctaagtcggggaccattctgtgtattagttgaactgtacactttaaaagacatgaattttatattaaatggtatgtgtattaggtctctgaaaagcggcatgggtgtgtacatgtatataaatgagctctgccagtgtcaggaagagtcactggcatcactcatgccacctctctctcatatatacacacacacacacacacacacacacacacatatatacacacatgtgtatacatacacacacaaacagagtgacgtgccatgtattaagccgttcttgcattgctgtaaagaaatgcatgagactgggtaatttacaaagaggtttaattggctcacagttctgcaggctttccaggaagcatgatgctggcatctgctcaggctctggggaggcctcaggaagcttacaatcatggtggaaggcaaagggggtgcaggcatgtcaagtggccagagcaggagctagagagagagagttgggtgagggagaagcagctgcacacttttaaatgaccagttatctaagagaactcactcattgtcatgagaatagcaccaagaggttggtgctaaaccattcaggagaaatccacccccatgatccaatcacctccctccaggccccacctccagcattggggattacagttcaacatgagatttggacaggacaaatatccaaactatattacaccatataataataacattttggtcaacaatggattgcatatatgacagtggtctcataagattataataccgtatttttactgtgccttttctacatttagatgtgtttagatatgtaaatacttaccactgtgttataattgcctgcagtgtttagtacagtagcatgctgtaaaggtttgaagtctaggaacaattagctgtcccatatagcctaggtgtgtagaaggccgtaccatctaggcttatgtaagtgtgctctaggatgtagcctagaagctacccactaggaagtggagagctggaacttgacccaactcacgtgctctttccacgactccccagctgcctgcacattgactgagtgttgtccatgggctaaaaggctcaggatcatttagctcactgccttgtcatgggcagagctcttttggcttgctgtgccctatttaagacaaaattgtctaatgaaacatttctcagaacatatccttatcactaagtgacatttgactatacacacatgcatgcacgcacatatacacacacacgcatacgtagctttactgagatataatacgtatacacacacagatgtgcatttatagggaagggggaaaagtagtccattggagggttttgactgggagaatgacatgacttgatttatgtgtttaaaagattattctggctcttgtgttgaggactgaccatagagagtgttgtcatgtaacaaaccactccaatagtagcttaaaacaataaagtgttattgtctctgacagttctttggataactgggctcagctgggtggttttcacttggggtctcatgtggtttccatcaggtaatggctggagctggtgtcatctgaagactcgactgggctggatgtccaagatggctccttcactcaattatctgagtctcagtgttcctttgcatggcttctctcttcagcagagtaacctggacttgctgtgtgacagctcaggtttccaggagtcaggacacaggaactgccagccctcttaaaagctaggctggaagtacacagcattacttctaccatatttcatcaatcagatagtcataggtcagccccagattgaaggcggtggaaggctggactctccttctcagtagggaagtgacagaaacctatagggaaggaggaattgatggcagtcatctttggaaacaagctaccacaggggactaaagtggaagaaggaagaacaccagtcagctgctgttaagattattgtcatcagtatttcagcgttcttgtccttgccttttctgagtggaaaacatgcctcctgactggcatcttgagctttggtctggaggggccttgccctgtcatgatgggaggggagctttacaggtgatctgtcattccagtcagcatctccctagctcagttatagagaaagtgacctggctaggttattttgcccagggttccagaggtggttgtcatgaaagcaaggggagaaccgggtctcccagggtcccagccattttcttattgctagaccacgtgtaactgagaatcccactctgagagttctaatctgggggaatgagctgtgagccagctttgccaagcagcttaattctgtccatccagattaaatttgcagcagcagggagccagctgccctctcagccaggggcaggggagcaagctgagtccccgagggatgagcagctgtggaggctgttcctaggcggaccccagacatatggagcaccccctgtgtgcctggcacctgctggggatatgatggtgaccaactcaggcacatgccatgttcttgaaagaagctgaaggtctgaatgtggtggtctgggccttttgttttttccccagagatcttgtggatggggctcctcagctggaggagggagaggtcagctaccgagtgccccctgctgatgttgaggtaaaatgtggcttgctcaataggccacatgtggtgtgctcaataaagattgagtaaactgagctcttgaaaggatggggaatggagaaaatgaatccaaattaggggtgagagaccaaggtggatgctttgagaagggctccctgccagccttagtgtgagctgtgggcgagctcccccagcagggaagagccacttccttgtgtggggcaggtgtcgtgctcagtgccgaggggagatacgacagcagttttaccctcaggatagggctggcaaagaggggtcctgtgtgaccatggtgactctttccgacatgtggcagagctcattcatcactcatagcgctacttcctgctgaactcaggtggatttttagttcccctaataatcaatgagagaatacagtctgaaatctatttgccctctctgttccaggaaaggggtcccaggaggaagggagttgcctgatgacagggagcgctgaaaatgtcactaaagctattggagtgggaaaagccaggtgggagaccaggtaccgttgggaagccaacgggagagtaggtagggaagagctctgaaaaagagaaggaatggagaccctgggacagtaaaaatactgccagtgccacttgatatttttgctaccttagtttataaaacaatttccttgattacacccatttaacagatgagaccatggaggcctagacactacccactaggaagtagagaactggaacttgacccaactccaactcaagtgttctttctactactccctggctgcctccgcactgactgagtgttgtccaggagtctgtaggctgattggttccgggtgatcctgtttagaggtcattgagttcatggccctgcctgggaagagctcttttggaaccctgtgccccattgcactaagaagccgcaacaccctgatgtgtacatcctcctcctggagtaggatacagtttgcctgaatcagatcagtttcatatccaaggctgccatgtgggagttcatggagctcacgtgtggctttgcatagggcaggtggttatggtgtcgtacaggtattcttgaaactggaaaatgaatttaatggaaactatttccaattccagcctatccaagagaatggcatgttcacatctcacccttttgaccctatttgacctggatttctgtcctggtgtgtgtgacccctccttgccccctgccctcaagatcttgacgggctcaagctggtgttctaggaggccacgcttatggttgggctgggctcaggctttgttgtcacattcagttttctgttttggtacaacgaaggctttgaggagataaacagagatcattttacaccttttatattatgacaaatacatattgcaaaacactgctgcttccaaaatgtttgggttgcagagcagtgaggaattaacagctaggcagttcccgagatgcttgtacttcatttacacatcagaattttttttacactgttcagtaaaataaaagtgagaaaacacacatacgtgcatgtgcacacccccatgcacacccagtgcaccacctggcttctatatcaggaatgtcttaaattagtaagtagttctttaagtccagataaactgataaataccattaatggcttaatttattctctgggtttgaaatttgacacacggacactatcttggctcaggaaacacaagtggttttgtgccagaggttttaatgaccgatcagtaatataaattgctgcatcactgagcagaaatagcttctccatgtcatttgatctggaaacttctctggccaggcagcagttaataaatttaaaaataattaccctctttattcaaagtcaaactaattaggagtgggttttacaaatcataatgttgttcaagccactgtacatccccatttgggacttgaacaggcctgggggcaacagacaggatccggtggtgttaattagagggcagcgagataacttggctgctgagctccagggtaggaggccgggcagtcttcagcatgccctcgggagaaaatgggaggtctgagtgaagaggccatgagggtgacctgtaggaaccttcaactctttcagtccatctgtaggggacccagagcagccacctattggtaatgtgaacatgggggagttggggccagggctggtctgtgtgggcctggccagagagactgagggagtcagggagcaggaaagggggatgggcaaatgactgcctggggacaagagacctgcctgaaggcagggaagtggatgggatgatctctagaggacattacttcctaggaaagtttgagccctaacagagtggtgcaggtttgtcatgcagattgcagggaagaggaaccccatgaagcctaaagtcagagtgtcaagtgcagggtatttggtgcacagtgacccagaacttgggatctggtgtcagactatctagattccaattccagccccatcacagattggataatctcaatataggcctcgcatggagtaagtgctcaggaaatggaggtgccagtttctctcatcgcatcatcctggtcttcctcagaggcttctgagaacatggatttcccccactggataggttgacggggccaagtcagtgaggatggtgttggaggaataggaacagtatacacctgctttgcaaggccatggtgaggtcttccaggatccctgactatgtcctccggccaagaggacatttgcaatgtgcccactgagttaacagccactggggccctctcagtgcagttgaaagaagtgagggcagattgaagctccacactttgagcaatctcagggagcagatttggtagatcttaaggccctgaggtctggaatgcccaaagcttcccaaaggaaccattccctgttggtgtctaaacaggtgatgtgtaaacccaggccagacaggccgcaaaactggaatcgagactaagcaggtgtaccagcctccaggagcaccaggcctgtgcccttccacgtcttaagaggaggcttcagtgactggtgccctcaaaggctcaggaattttgggttcctggtagggtcctgaaccatgtctgctatcaccaggaacctgggtattccctatctcttgacttcttcaaatagaaccttccacctcatcctaccttttcgccagtaagaaaaaagaggcaaggtcattcctaggtttagaagttctgaggctgggaagcttaagggcaccctctgcaggcccagggtactaggttgaactagaccctagacttaccctggaggaattcagctctctcctccagccctcaacctgccctgcaaggtctgccaggttagtgactcaagtttgctgtgagagtagcctgtgtagctggcttatcctgtagttccttcatttcctcattctctgagtttttaagtacctactgtatgctaggtgctttgtggacttaatacataatagtgaacagaaattgggccctgccttcctgaaggttacggtgttatgaaggaaatgagcatgtaggttgaacttgccttaggtacagataattcaatagctgtactcttttggatacttttgagttattatttttattaagtcttcactatagtccaaaaatatagaccttttttcctccctaatctttgccagagaaaactgagtcccagaaaggttaaggaagaccaatctggggcaggacttgaatgtgtgccttgggcttctgtaccccagagcccacattttagcattgtcttccctccctgtgggggcctgggcatcagctctcatgtgcggatcaatggatcaaagcccctatttgaaaaagggggtcagttaagaacacacaatccaaactagaattagggcccacgagttcagcccaaggttctctccactgtgactacaaaataagtactttcttttactggcctagaaaaggttgcttagtttccacattactgcgtcacaggggaagccactcaaccagatgcaaatgttgagatgctggttctcatccactgtgttgtcggctgcaagagtcttgcagtccagaaacggcatacctctggcggctgagggtccatgctgtggactctgcccttcccttctagcagggagtgggcattggagggaaccccacccaaagggtcctcttcgtttcagtgtgaaggagtctaggaggcatatactctgtcttccccccactctctgtttctctctctttgtctctctctctctctttgcactgtgtggcctccccctttggaggtgcagaactgtctctccaaccttggtgttggctgcctgcttgcactggcccctctctcctgatatgttaataatatttggaggaagcttcagggacagtccctggctctgaacttcagagtagaaaatgaagtccttgtttggagaattttctgtagtgggtgatcatggtgggggcagggggtggggtgggagtagcaggcaagacagaggatttattttattttaattattatttttgagacagagtctcgctctgtcgcccaggctggagtgcagaaggcagaggatttaaaagggtgagcagcaacgctccttccctcaggatagctgctggccttgccccctcctgccctgagcttggcacgagggacagtgctgggcaccaaggagtcctgtaatgataggaaaactggcaactgttctagttcctgctctcaagaacagcctcccagtggctggtcccagaggagctgggagggggccagatgatgacaaataacttaatctacctaaactttacatgaaaaaaaaaaaatccaaacgaacctcaaacctctgtccaaggtggagggtatcggggaggacaggacagtgagtcatcagagggacaggcagactccatgtggtttgctgtgacctccccattgaaaacataatagcatttgacttttataaatatcagaggtgatttgtatagcatttcacattctgtgccaaggaatttaacatgagaaagctcaggctgaagaacggccgcggaacgtcataggcactttgggaggagggtcatgtgctgctgtttgtacagtcagtgccccagcatagatttactcttgacctaatttcatgctgttactataaaggcatgtttgatgcctaatatagagttttattttccaagcacagggctctcggctgtgctggagctgcttgctgtagagtagggaggaacaacccagccgtctcctgctggcccagaccagctattctttctctccattgttcaccctagtggctcccagggcccctctggccaccttctggaggggcccccgatactcttttttaaattaataaatttcatttttttaagagcagctttaggttatagcaaaatggaatggagagtatagagttcccactgtacccccgtcctcacacgcaagtgcacagcctcccccaccatcaacatcccacgccacatgggtggtacatttgttacaattggtgagtctacgctggcacatcattgtcacccagggcccacagttcacatgagggttcactcctggtggtgtacagtctgtggatttggacagacatgtaaggacacgcattcaccatttttgtatcatacagaatagccgcttcactgccctgaaagtcctttgtgctctgccctttcatcaccccagcacattttatatgaagcatcactgccctggacagtgatttgaggggatcagtggtgtttggctcttttgggattggagaaggagaatttaagcaaggcaggtttggattagaaagggctgaagctcatttcctccacagacatcttgagtgtttctcgatgccagacatggatgctgggtcctgggatagggattttggacatgtatgctgggacctgggaccgggatgccagacacggatgctgggccccgggacggggatgccggacatggatgccgggccccgggacggggatgacggacatggatgccgctgggcccagggacggggatgccggacatggatgccgctgggcccagggacggggatgccggacatggatgccgctgggccccgggatggggatgccggacatggatgccgctgggccccgggacggggctgctggacatggatgccgctgggccccgggacggggatgctggacatggatgctgggccccgggatggggatgccggccatggatgccgctgggcagtgggcaggacacagaccttgcccttccccggcctcccaccctagtggaaatgtgattgcagattaccattggggatgtggaggcagcatggtgtttggaagcaataatgaattaggagaaggagaactaggttcttatcctggctctgctatggacttgcttcatatgggacaaatggcttcgtttccttgcttctctcaaaggtagtgtgtaggaattgggcaagaaaagtgctgtttggggggttctgtggttccaaggacagcctaagattctgatcttgcattgatggtctgtatttttctcaaccttagtttttcacatttgtaaactacgattaataatcataatggttgctgtaagaactacataaaaccatacatgtggggccgggcacggtggctcacacctgtaatcccagcactttgggaggccgaggtgggcggatcatgaggtcaggagatcaagaccatcctggctaacatggtgaaaccctgtctctactaaaaatacaaaaaattagccgggcttggtggcgggcacctgtagtcccagctacttgggaggctgaggcaggagaatggtgtgaacccgggaggcggagcttgcagtgagaagagatcacgccactgcactccagcctgggggacagagcgagactccgtctcaaaaaaaaaaaaaagaaaaaaggaaaaaaaaatcatacatgtgaagccctgagccctgggaaggaggactgatgtatgcataagtggtagctgcttgctactgttatttttagaggcctgcagtttctgtccctcaccagtagacaagaattcctccactttatttagtagcttattcagtaacagtgtattaaatacctactgtgtctgaagaagggattaaagatgaagatcttttgcctcttaaaaactgttctagaaattggaggggaaggatagagtctgatctttgaggactattattcagaacgtggtctgtgcccagcactgtggctttttatgtatggtccaatatagtcatcaggacaccactaaggggggcttcactgtctgcatcactgatgaggaatcacaggcccagagaggcttaaataatatgactcatccagtggcaggactgggattccaggttggtgttttcttggggtgatctggcaggactcaccgtcctcactggtctgagttgccccttcactctcagaattgtccccacatccgagtcctgaataatcaacctcagttcttgatctcaggtttccactcgtctcccctcgtgcccatgctcagcccctcaagcttctcctttatccctctctctcccactgtccactcctgtgtttcctctctgacttctcacccttctccttagtgacgccatggctgcctgatgacagaaaggagttaataaaaaccaatgtgtaactgaaacttgaaaggccataaattgccttgttttttctaggatgttggtagcattttgatttaatagttggacaaacacaagggcctattttattcagagtttacaggcctcaaggctgttattcctccaaagttaatagcattgaaattgcagggtttgctataatttgcctatcgctttctgctccaccattgatgtttactgtcagcgggatggaatctcaatccgactcacttagataacatgtctgttaaacatttagataattgtaccatcattaacttgtcacattattttagagattcaaaacagaggcagggtaagtagaggtacccaaagggagtggaggtgggaggagggggaggaggaggaggaggaagagacaacctcttctgagttagacagccaggagaggagaaagttcattgcacaccttggcatctcattggaggtgtctaagttaaggaggtacgtgccaccaagccgggcccagggttgctccctgaggaatccggggaccagtgtctcaaccaccgaccgccgtggcagtagggcctgttatcagcaggcccctgagacagtgtggcaaatgctcagaaacccttggcgtttcatccccgactttggcctttatgtaccaaagtttctaagctttccttagggatgctgattgcaacactatttgtaattgcaaagcaatgagaatgacctaaatatccaaaagtaaggaatctgtcaatgatggtatggaaagatgtccatgatgttttgcatgataaaagctgattagagaaatcaggttatatagtgtggtcccatttcatataaaatactaaagccaccctataagactctgtaatgctctatacctgttaacaatgattatctttagaagtgggattatagggcaaaggtgttctactttctgctttatctatttttgagtaataataatgatgatttacaagcacatatcacttacataattttaaaaattaaagtcactttataaataagaaaaatatcaccttcaagtctcattctgtgtatggaaggaggacttctaaaaagaaaaggctgcaagtacaaataaatgagttttgggagcgctcatggacatcagtatctcagccacactggcaggtgcctcagtttcccactgttagaacagataaatgccagatggagaatgcagcacaggggaatgggcctgtgccagcactcagaggtcagggctgctgtcttgttcactatgggcctgacggaggaagtgagtaagaagagagctttttcttacaccgacataaggactgaggtcacacctggagggggtgacagaggccacaaataagaatgagctcagctggaagtgggagtgactccccatatgggagacttggggatcaattaaatatcaacagtagtggggcactgagcttggaatacaaaactgccctcgagaaataacggggtgtttgctccctgttcccatggtaccacgaggtcacagaggtgactacagtgctgtccatctggctttggacactgttatctcctgcattcccagggccttctgtgtgacctgggcgagagaactgtcactattgcctctctccaatctgtgtgtgccccagtgacacaggcaataggaaaaatgtttccccaactgtaccgtaaataatgcagatatttgggcgtgggagaaacaaataatatcaatattttatagactgtaggctaaataatgtatatatttagaaaagcggcttaaatatttcatatgctgcagtgaagattcctgcttagaggcataatttgggctggtgagggctgtgggttaaggatgcagtcctgcggagccccggggtgagggggcagaggggaatgcagtaaaagtgtgtgtgtgagattggagtgtggcaaggacaggcaggtatcacttatttggaacccaagtagttggaagtctcagattttttttaactgtcctgtgctctttttgtttttaatgtgggagagagacaaatgacaacctaataacaagaatttattttcaaaaagtaacttccaacccaagagaattgaaaatgtgtccacataaaaacttactcatgaacattcatagcagtgttgttcacaatagccaaaaggtggaaactacccaattgcctatcagctgatgcatggatatacaaaatgtggtatatccataccatggactataatttggccataaaaagagtaaaatattgatgcatgttacagcatggatgaactttggaaatcccgtgctaagtgaaacaagcaagacatgaaaggccatgaattagatgattccatttatgtgaaaatgttcagaacagagagctctagacagttagtagattagtggatgccacaggcttggggaaaatgagaagtgactactaatgggtatgtggttcctttttggagtgatgaagatattctggaattagatagtggtggtgatggtattcagctttatgaatacattaaaaaccaataaaagggccgggcacagtggctcatgctttgggaggttgaggcagaaggatcacttgagcccaggagcttgaggctgcagtgagctttgatggcaccactgtactccaggctgggtaacagagcaagaccctgcctgttaaaaacaacccccccgcccccctgcaaaaacaacaacaacaaaaacattaaaagggtggaattttatggtacatgaattatatttcaattaaaataaaaaacaacttccaggtatgttgttggttcttacagacttaacccaacctcctatacctgcggcatcacaggactgcaggtaacgctttgcatcatagtgaccattcagacagtgcaggagactgtggcacctttagaatcattctattcacagaaggcagcagggagtaggggtggctctgggatgcctccttgccctccccattcctccattttcagaaacaggaaggaaggatcaggtctgaactctgatctggtgaagtagtgagtccgacatctgcaaagtcaggaggagacggggtagttgcgtctgtgtagatttctagaagaaaagccagccatcatctggcctgggaggagtcactcttgtcaaaagcaagacacggatggtattgacccaggcaccccattttaagaaaaatcatacctgtaatacggcttcagtgtggggaaattagaaaatacttacaaacaaaagaaatatgttctctgtgtcccactatctttttttttttttttctgagacacagtcttgctttgttttctaggctggagtgccatggcacgatctcggctcactgccacctctaccttccgggttcaagcgattctcctgcctcagccttcacaggcatgcaccaccatgcccggctaatttttgtattttttagtagagatggggtttcaccatgttggccaggctggcctcaaactcctgacctcaggtgatccacccacctcaccctcttaaagtgctgggattacaggtgtgagccaccacacccggtctcatttttcttttattcacaaatggggctatgatattcagtgcatactgttttgtaatctgtgatttgcctaccaacagacctatgtcttgatgatcattttaatggtttcccagtgttctccctacacccattcgtttttttctccccatgatctctgatgttccttacttgtgcaccagggaccagaccctgtatccagaggaccttccaggggctccaggcaggagaagtggctaacagagatgcagctcattaccacctctcacctattgctgcttctgtcaacaagataaactgggcccgccaagcagttttgcagtagctgtttactcgaccatcccaggcaagcttgagatgctgggaacatatccagtccccacattcagtcttcttagaaactgtttcccttttggttttctctaggcttgcaagtggtcactcgccctgagctggatttgggcaggtaatttacttccgctactaatttaacgaatggcactgccctgaggtcgggcagactgaggaaaatataggcatcaattcatttgccacgttaaaacccagagttaagtaacaagttaagcatctccatacattaagtatcccaggcccaactagggaagatttcctggagctgatgagccccaaccaggcattaggaaaaaggcatttgaaaaaaaaatttcggccgggcgcggtggcttatgcctgtaatcccagcactttgggaggccgaggtgggcggatcacgaggtcaggagatcgagaccatcctggctaacgtggtgaaaccccgtctctactaaaaatacaaaaaaattagccgggcgtagtggtgggcgcctgtagtcccagctactcaggaggctgaggcaggagaatgacgtgaacccgggaggtggagcttgcagtgagccgagatcgcgccactgcactccagcctgggtgacagagtgagactccgtctcaaaaaaaaaaaaaaaaatttcttctctgaaccttaggagaagttagctaacagagagattgtaggtttgggtcagacgcaatgttccctgcccccagtaggagaagatccattacagattggaaatgactttgtctcttaagtgtgcattgtcagatgggacgcacgttcccctcaaccaaacaaatataaaatgcttccagcctctgcctcggattttctattactgtttcacaggactccagagagttttaagatagcaatttgattaagcttatggggaagatcccatcagataacattctttttctgcaggtagagataatgtgttcaagtattaagtatgttttaaaggtaattatcttttccatattcattttagttacaggaattgacaagggggagactctgcatctagggcccttgggccctagagtcactctgactgctctcctctggggaacacacttgaggcttttgacaaatgaatgagcaccaagggtttttctattttgaaatggctcgggatcccctgtctccagacaagtggtctagagggcaaggtcttggccactgacctcatctggctccctagcttagattccttgttctgggacacccactgggccccaaatcttaagctcctggatgtcaagagggagcctggctgctactcagaaagaggacttgtctcatctagtaccaagtcatggtgccatatcgccaacctttcaaaagtagagtctggaattgccatttacatatactgagcccagtgttggggtgttttcacatcgggagacactaattaggggtcctagaattctaaaatctgtagactcctagactgcagaactgttgcaaggggctttagggagcatgatgctgagcttcagaggggttctgggatttgtctgggatcacacagcaggctagagagacacactgtgggctagaacccaggaatccctggtcttagaccactgcttctgtccctctacccacaactctgtgccatctccagaaaagctcctccttccctttcctggaaatccccagagtaggagattctgcccccaggcagccctccttggccgtctgtgagtcagggtctgcaccagggctctgtatgggcctgaggagcccccatagcaagcctgatgctgatggcctggagttcctcaaacctcactttgcctgctagctgtgccgttctaagcattctgtacatttttacaaaatagaaaaattagggctcagcccgctttcagaaagctaactattgctagggaggaaaacatacatatctaaaaagataagtaataaaacaaggcaattggatgtgatatacctgcactaagaattgaggagtgatgtttttaggttccccatccctttgtctgcccaaaatccagtctgctgtggctagacacctatggcttctgcacacagcatttcccccatgttacttctctgtctgatctctcaggtgcccttggtttgacagctgcagcttgttggtctgaaggcaagtgacactgggaaaggaccctagtgagaggtttatcacataagaccccaggatggcggcatgctctgtttttgaacgactgcctcattcctgtaagacaaaggtggcaatggagggtggatgcagagttgatggctgcagcccaggttttggtgcttggcctcatgtgttacatcctaggtaaggatgtctctgccatcttaacacccatacctgctcttgcgtctctctctcttatccttcaaagcatcatcattgtcttaccccagctatacagtgaaatcatttagaggaactttatgaaaaaaatgtattaatagcaagcaaaggttcccacctcaacccggatgagtcagaacctcctgcatggggctcagacatggatgtattttcaagctccccaggagattcctatggataaccagggttttgaatttccagatgggataagattagactctgctgcatggcccagaaggttcctcacaatcagagtcacaggcctcatcttttgtcaccccctatgatgcgtgtacactgagccacttagaatttcccagactctcctggctgtttttctcctccatgcatcttccactaacccccacactctcatgtgtcttgtttgcctgatacacacacacaagacacacacacacacacacacacacacacacacacatattgaggcagagtttcactttgtcacccaggctgtagtgcagtggcaagatctcagctcactgcaacctccgcctcctgggttcaagcgattctcctgcctcggcctcctgagtagctgggattacaggcatgcgacaccacacccagataatttttgtatttttagtagagacagggtttcactatgttgaccaggctggtctcgaactcctgacctcaagtgatcctcctgccttggcctcccaaagtgctgggattacaggcgtgtgccaccatgcccagctaatttttgtatttttattagagatggagtttcactctgttggcccggcttgtcccgaactcctgacctcaggtgatccgcccacttcggcctcccaaagtgttgggattacgggtgtgaaccaccacgcctggccttgcctgcctggtattaatagagtcttctcagctcatttgtcttctctatgacacccttttcacagttgaccctccttctggtctccagcaccatagatgtacaccacttgcccttagctatcttgccactgcacgagttagggtgaagattgaaccaccttggggacttgggcctttctactgtgttagttcaaataatcattcaataaatgcttattgcatgattaatcaaaaacagaaaagggagcttcctgattagaagcaggaatgaagaatctgttcttgtctggcttcagatttttgctcttcacttgccaggtgaaggaccttggaagagtcactcatcctttgcaagtctcagattccttgtctgaaaaattaggacaccatacctgccctttatacctcaaaaagggatgtgaggaccaaaatggtgttagaacagggtagggtctttgcaagcagtaaagcatgattcagatgtaaggtgatgtcattgtgatgtttcctcttgctgtggtttcctgtcatgggctctggcttcagggtgccctgcaatgccaatgcaccccagtctgtgccctctgcacagcctcccatcccagcttttctgggcccttttcttccgttggcttcttttatcttgcacctaccttgctttctccctgcacgtaccaccaccacaaatgctgtacaagagcaagttaaccactattgttttgaatgatagagaaaataatgagggaaacagactggtccattcagtgattaagtattcagtaattaagtattcagtgttaggtggtgggcagaagttaggaagaaaggtatcttaaggtttttgattcggcgtcatccgaatgggtcaatgagacagattccacaggcaaaccattccagatccataacctctagagtagaaagtttcagaaggaagagatcccccaaactgtgtaattcccttgtaaatctcattcattcaatgggatttgagaaccaaccacttgtgcaggtgcccgcatccgaagataacttgcccccaggagacagcagataagaagagggcagagacaaaggaggtctttttgtgacttgcatcatggatgcagaaaaggtggataacccaactctggtggggtgagtgggcagggaaggtttggaagcaggaggaggagacactcaaagctgctttggggtgcacttattttgtgtgctggagaaggatttgctggccatttcttgtgaaataaacttttttgtgtatgcatgtgtatgtaggctgttactaatcccgttcctttcttgatctactgtttttcaggttaatggtgtctgggatttgtggagggaggaaggatataaaagggcaaaaacaggagaccccggtgcctggattcagagccttcacattccggagatccccagaggcccctctccccagacccttcagctccagaaagccattgtgctccctcctggcctctgaccctgaggctctgggaagcagcaggttgttgacacttggacaatcatttcttgcaaggcaactgcctccctggggggctctcctctgccttagggtggtgactattcccccaaccagggttaaggaagagaaaaattaactgttggtcagagcaggaggcaaggatagagaatcctcaatttcaggcccccaggcatgttcacccctctctcacttgccacttcaggagtacaccacagcccagggataagctttaggaaaatgggttcgagagaggcatttctgatcagagttccttctggcatcctgctgtgggtctcatgtttgttgaggggaccccatatttcttcatgaaggatatctgtatgtctgctacagtctcaggaatgcagccacaggaacaaagaaatttctagccctggtgctgctacttattaggagcaagacttcagacaagttgcttttcctttcagaagcttggtttcctcattggtagaagagggtcaaaaagtcacttgcccggtgagcctgctgagaagagcagatgaaggaggtgtactctgcactctgtgaaacattgcaaatgtgcgggttgatcattaatgttttctcttacagccaaagctagtgtgtgtgtgtgtgtgtgtgtgtgtgtgtgcgcgcgcgcgcgtgcacagtttgtgagtgtcgggttcccaagcatttactctcctctctcctttctaggacatttcaggaagcattattcaaaagccggtggggtgggacagagggactattaaaatttttaagaatcaccttgcatttctttcactttggtcttaataataaataactctaaccctgcagccaggagctgggatgttctgtccaaattagcacaaatctctgtctgcaacagccgagcatccccgttcagtgggcgggatcagtaccatttccccagcaatgagaaaaagccctcttgctaagctacagaaaaatctcccttgtgctttaattttggaagaagcggattagtgtggccatatttaacctttgaccctgaaacaaaagcattatcaaaattatttaccaagagcgtctgtcttcttctcctcacccccacttccctgtttgccggggctagtttagaatcttggtaaacttcttcagagcaagagcaaaattttggaaggccatcattaccttagagacatcccaggcctggtgttcactgccagggctcttggggtctaaggtgggttaaaggacagagatgagaatcttataccacagtggggttcaaaatttgtgagttggatgtaaaaactctttctcctctgaaactagcctagtttctggctgtcttggagatttaactattcagatgatatgttgattttttttttgttttgttttaaagatggagtctcactctgtcgccaggctggagtgcagtgtcttgatctcggctcactgcaacctccgcctcctgggttcaagcgattctcctgcctcagcctcccgagtagctgggattattacaggtgtgcaccaccacccctagctaatttttctatttttagtagagacagtggtttcaccattttggccaggctggtctcaaactcctgacctcagttcatccaccctccttggcctcccagagtgctgggattacaggcatgagccaagtgagtgacctaaaggtgcagattgatttctaccttcttctccttccaggcagaaatccatagacttggtggtgtggggtggaggtatatctagacctgagccatttctgtgggtttaaatctcatcttccctgtcattaactgtcactgtggccttggacaaattatttgaactctgagccccccacctaccttccttatctgtaaaatgggcatagcaataatagtgcccgcctcctagagttatttttgaggatagataacaggatacacatgaagtgcttactgtggggtttggtgcttactaagtgttgagccagtactaactactgttaccacagttgttaccattgtcatcagtatcatccttattgattcttcgtcacttccccaggtcctggttggctcccttccccctcccccgcattggggtgttattggcgacccgccccatttcctgcttgtcctctgccctcaccttctttgcagtgattttcagagtccccgtttgcgttcgcagtggggagtttgacttcatttcataccaggaaggccagcttgcagtgggggattgggagggcagagcgctttataagctcgcgatgaaagctgtaaaacgagatggtcaaggatctggccaggcctggttcgggattatggccggcccctggaatgctgaggggggcctcttttaagaagccagtgtctatttacagtgtatctctcataaaccccaacgctggggcgagggcagggggactcgccctcctggcatgtgattgattatctggtatttatgccattgaggacttgtcagcggtctggggtcaaagggtcatctcatgtgtcttgccgccagcccacctccttttgtacagtgtggaccgggcgagctgtgcacaaaacagctttttcttttccttgggaaaggggggatggggaggggggagtgtcaatgaaatttttttttcagccttttctgaatagtgttctttaaattctaaagaacttttaattaaaagtagcaggaaaattcatcttgagaaggtttaacttaccttaacagatacttttgtgtcccaagaagctgggagtgactttgaaagaaagaaagaaagaaagtaaggggctttgttgtgcctctccccctcccccaggcattttcaaagtttcctggagttcttgtccactcctgtctggtgtggaccctgcttgggaaagcaggaagggaagaggtcattcttctcctttaacatagccacacaaatttagaaagggacttggggattctctgctccaattttctcctgttatagatgaagaaactgagccttgacaggtgaaaagacttcgctatagagtcacacagctacacagttgcggagtcaggcactgggctctgattctctgtatttcctagtgctcctttgagcatgccaggttgcttcccgaagctgctttggatgccaagtgaagataaatgtaatgatacctttgctgtcgttcagtcctggatgtttgagacttgggaaccactcttaaattccttgggctggaagcatccctgagggaccacctggcttatccccccatcccccatcgcctgcctcagagcaggcagtccgtgctcacgtgtgccggaggaattgctgtgggtcccttttctaaaaatctgcagaggaagtctctatgttttctgcttggtagaaaatgccggcacccctccctcaaccttcatcactggatggtctggacatccttctgaacagctgactttgtttcttccttctgtggctcaggagtggcccacccatggaagcttgtctgtctgttcccccatccccccgaccccctgtgtgcccacagggggccatccagagctgtgactggccaggacacctcagtccactgtgctgctccaccatggcctggctgctgtagggaaacattgtccctcttaactctcacccaggcttttggtgacgtgaggccttgatgaaatgctttgtccatcgcttccaactcattgaaccaaggtggacactgggcagagaaatcatttgccaagagataggtatttgtaggactcgcataaattcacgtgtcctgtatcctgttgtttgtcttctccatcccaccacctcctcatttaaaaaatgcaatacaaagaattgtcttctaaagaatagctttagaaatcctcattcctttccattccctccattcccattcacattaaattagcgaatgctaatttggactgatagggcaccactgtgaaaaaggtgtgaagaaagatctgcttcttgctcatgggaggagaccccagcagtaattagattctcactgaagtcactgggtgccacaaactgtgccagtgcttacctcagactgtgttatttggtcctcatattaactttccaagatgaacattcctgtgtccagatgaggaacatcagggctagacataggtagccttctctggggtataatttgctttaagctaagtagtattaaacatgttaaacacgtcatctctttgaatccacataaaatccctaaatccctgtgagacagggattgttgttatcctggttttagatgaaacaggcacagaggagttaagtaacttacctgaggtcacacagcagtagtaagtggtgaagtggggtttgatccaccatgaatgactgcagagttcacacttgaactacttgctgctccacctcttttaagttgtagagcttcctgatgctggcgctcatgttttgttttgtcttttcctactattctgacataaatctgctggggagacactatatatagacatatataaatcagccagagaccagcaaaaggtcactgtgtaatcagatgccagcctgggtggtgcgtggagaggaatttagagaaggaatatgttaacaaggacacagtatttagtctcatgtctggacccccatagtaaggggacagtgccttactcatctttccatctctgggacctaactcagggcctggtacacattatatgttcaataagtactgattagattactgggaaagagttagtaggggagatgggacttgaagttttttgaaaatgatattaataactgtgacagttatttgtgaagttttttgaaaatgatattaataactgtgatagttatttgtgaagttttttgaaaatgatattaatggcattaccttttatggcatactggccaggtactcagctaagtttattatttagttgtattaactctcacagcagccctatggctattatgatccctggagtaaacttaggctgaagagagattctatatcttgctggaggatttaaagtctcagggtggttggtgttatttgggggcttttttttggcttttttgttgttgttgttttgagacagggtcttgctctgtcgcccatcctggagtgcagtggcgcaattttggctcactgcaatctccgcctcccgggttcaagcgattctcatactttagcctcgtgagtagctgggactacaggcatgcgccaccacatccggctaatttttatatttttagtagagacggagtttcgccatgttggccagcctgtggtggtttgtttgtttgtttgttttttcttgattttgaaattattttttttcctaaagcagagaagaaggcacaagtgaaggagaaaaggcagacgtgagtgatgatggcagaaagtctgctcaattggggtggagggatttggaagccagagagaggagcttatcttttttttttttttcctgcttataggtggaagttgcttctttaatataaagatttctggatctatgaggttaactgtgtccagttaattgaatttataattcagcaccaaaacgctgaaaagaattgtcttttatgtcccttaatgagtgctataaaaacaagtggtgaatctaattttacgaatgttcctttatgacttacctgataactagtagttgttcaacacaaaggacacataactcagtctggacctacactggctgcctgccgtaaaataacttgttttagaagttggccttcttgcttctcttgagtggcccagggattcacttgttcccttctctgctccctcttctcattgaggatcaggctcgggttcttcattctggaggattgagatgggttaccttccctgccagtccaggatgaccaagacctcacatctcattggctctttccaaaaaggggaagggaaagatatggcagctcattcagatgtctctctggtgcagcatattgcttctacctagaagttgcctggtgtgctagcaagaaaagagaaattaagagaaagactccttttgtctttaccctacaacgagaggtaaagagctttacagccgcagcagccgcattaggttagacattggtgagaacttcctgagttgcaaagatgttcctaagagagactgataactgtccatctctagagctgcttcagttgtgagtgggcacatatatagatgcccttatctttttatagcttttgtctttttttatgttttgaaagtttaatttgaattattttgtgattacagatcttacaggtagatgttgggtacaaaattcaggcattctctgatggctatttgagaaaggttggctgttcccatctgcaatagtcaggggcaggagcctggactcacaggccagtacagcactcagggagacagcctagaaatggaagggcttttggaggagggaagctcttgaacagagcagacagggtaggggtgtgggagcgttgatgaaggaaggccaagataaggctgtggtttccatttgttaccacctctcccgcttatcttgagtgagaacaggccctacagctctgagcgaacctttccatggggctgttgagctgtgaagaggacatatacgagctctcctatcctctcttcccagtgcaccctttcccttgcacacacaggcacctgtaaaggctgcagctttggtctattggatgggtggggacaaatgcagaagtgtccctgttctgggtgctgattacttcctagcagagctggggggtggactggcacatttgtccttcatgatctgagtcttacctctgctggccttgtgctcagactggctggtgggccatcttctgccttgtcccacccttactagattgataaattgctgttccagtcaacagggctctgacccagcccttatctttggtcagaaggaggctgggtgacaaggacagggggaggggctgctgcacaagcccagcctttggacactggtaaccttttgtgggggaatgtacacccagctgctttggggcccagaggaacattctggcaagacagtgctatcagcctaaactcatcacaccggaggcagcctgcagcacatacacatttctcttgacttacaggagactggagatggagggaaataagaagtcacctccccttaccccctattctcactgagttggcatgacactaaaagatcccctattccctatcattttcagaagaaccaagacggcttgccactcattcattcaacatttattgcatatctactatgtgcttaaatgctgggaatagaaagatgactagacccagtctgttgattcaaggaattcagagttgagaggaagacagacacataaacaggcaattataatgcagaatgctgagtgcagcgatagagatatttatacacaggatactgtggtagcccagaggaagggtgctcagcagatacccaggggacagataaggcttctagaaaggaagacaccacaaggttttcaagaagtagaaagtagccaggatgaagggagagaaggacagaagaaatggaactgtatgtgtttagaaacagtgacactgtggcctgagtagctcagctgagatagaacgtggtggatacagttggaggcataggcaagcccaggccacagaaacttgttaggctgtgtttaggagcctagattttatccacagatgacaaggagttcttggaagcctttaaaaaggaagttatgagatcagatacattttggataggtcgcactggtggtgctgtgcaggtgagatcagagggaggtaagctgtgtttaggagacttttgtggctatcctgatgagggatgcttacatgatagaaaatgagctggattggggtatctcaatcctaatgtcaggcaagaggacctagaggccttcggggtgacgtccaggcatctagctcgagtgaccaagaggatgttagtgctgacagctgagatggagatccaggccaagcaggtttgagaggcgaagatgtgggtttcaggtttggatattcaggttgaatataagatgtctgcggaacatctagggagcagctaggtgtatggattttgtgcccagaagagaagtccaggctggaggcctcctggcttcctggtggtcactgagaccgtgagagtagagttcacctggacagatggcggggcatgaagcgtcatgagttaagggcagaacaccatggtggggatgagagttggggcaaagggcactgctcagcagagaagggcctcctgcagccagctccttaggctccctggaaggtgaggaaggcaggaagcatgggacctcaggtgcagagggcttctcagaggcggattctcaaggtatggcctggtgtggggatccctgcagatagatgggtctctccagggtgaggagcgctctcctggcccagctcctggcattctcaaatcccagggatctcttgtgaacagggccctggccctggggtaggagagaagaggctgacaggctgaagaataatctcagaactggtggggacttaggggattgccccttgcttccagggggattggatgggcagtcctccaggctgctgttggaaatttctcagagaaggacctgctgtgctgcacggaccttcctggaagtccaacccaggtgaacccttcttgctggttccattgctgcacgtaccatccctttgcacatgtgtctctcttttctgaggttcatcatgcttggttctgtcgcattgtctggagggaatacaagcaccctgattccttccaaagaagaggagctcagggccctgggtcctgccccactggggctttacatttcctgaaacccctcttccactttccctgtcccacactgatcctagaatgagcactccatttgggatgggtggccgctctccctctacaccctcctccagtggcttggcacttcgggaccagctgctggagtgattgacataaagccaatctataaataaagtctttttcttttctcataaagactttgtggttgagtttgccttcaaggtcaagatcagacctttctaaataaacacatatcaaaggatcattagcaaagcagcactgttaaattgagatattaacttctgtcaactgcttgtttcttttttgttctgtaactcatgactgcagtaggtttttattattttgtcctcaggcagtagcatctggcttctgtagagactgtaaaaattaaaaagcaacacaaatcattgcgagagaaaagcagtaaattcaatgataagaatttaaaattaaaatgtttcggtgcttttatattctgcaaaacatgaaatgagtgagtttgttgcctgttgccataaacctcacccagctaatcgtccgcttgagttttttcctgtctcttttgctcatcaccatcaattctgtcttggcacaaggcgtaaagtgagagccgtgtgtgtgtgtgtgcatgtgcgtgtgcacgcccatgtgctggcatgtgtatgcatgtacgtgcgtgtatatgtatagcggggctggggcagagtggtggatgcactcactgacctccacctcattagaatgggggagacaacagtagggaggcatcatgtgggaaccagggtagggaaggaagagttgaagattattacatccccatgggtcagagttcccttttttcatcaccctttctagttaaatacaaaaacaaaacaaaaagccccaaccaaccaaccaacaaacagaacactccaggtcacagacatgagcataaacagcaacctgtagcatccaagttaaaatgtaaaaaagaattccctgagcaagtgtgtgatgctggattaggggtctgagtgggtggctgggtctttcccattccagagatgcccagcctttggatggggtgctggggagtgggatgggaagcatcttaggctccttattccaatcagaagatttagggtttctgtgttgaggtcactcattcttactgcaaaatcgagttgtgtctctgggcctagctatgtcctgggctgtgagggagataaaagttgattggttttttttcttgctctggaggaactttaaaaaaagcttaaaaaaaaaaagtcttttaaacagtcagaggacaatttaagacaaatgtgagtaaggatgtgatggcattgtataagctgtttgcagacattctgggaagcgtgcagagtggtgtggggtgagttcaaggggagctattaggcctgagttgccttgaactaattctccagtctgttgggcttggggtctggaagccttggaaagcctggggtgaacactgtcagggtgagctcacccccatgtctaaaccaggccacaggactgggacagtgagggggaatgctgtgggtcccttttcacatagtctgtcccagtttgactgctggacccacaggcatgaggccagagctctttgtcccagacgaacttctccagcctagagagaggtgaggaaagagagccagtctttggcctccgtcaaagggaatgaaggaaagtgtgaagattagtggacggaggggtcgagttaagagggtatgactaataggctggtcattcagataggagagcacattgttctctgggcccagatggtccttggaataaatcagctcaggcagaagcagacttccagtacaaggaagtaggagcaactgcttgcctgctattctctaatgacatagcccaggcccctggccctgaatagcagccattcaggcctccactgtggtgttggagtgggggatgtgtgtgtgcaatgcatgcatgtgagtgtgtgagcaatgcatgcatgtgagtgtgtgtaaatatgtcatgttctagcctccgatgcttacagaagagtggatgagtgtttgtgttgtaaggagctggtacagggagatttttaccttggagcccttctcaactttaaattccaaccctgaaagccgtggaagtactggagtcatttgattaatgtctccttcagtagatgggaagctctaccagggcagggactgtgtcagtctgattcatcagtgtctccccagaccaggtgctggtggatgcttgatagacatagatggaagaaagttgtagcaacattcttatttttctccattgccttgcagtcacggcccccgttaattaagtagtatataagtaaatgaatgtatcagctactcctcccatgacttccctctagggacggtcatgaggacagagtgagctggggtagggatgcacaccacagcagttacatagagttttgggtggtgcaggtcctttatttctgtacttgggacactccacagataatgtggctttgaagcaggactttctgtcataaaagttttccaggtagacagcttccctagtttccctggttgaagacatgcaggcatgtgcaggtcgtagaatacgtgtaagcatcacggtgatccgtggtggtttttctggcatgatggccaacatttcagtggaagagcctacccactcccccctcatgccctacagtctccattcaaaggctgtgctagttccttttcccttcagaacccattcagcttcttaggaaggagggtagggaagagccaagcagcaatatcactgagtaaataggaataatcaaacagatactccctggagagagttttctttctatgaagatcttaattaatatgaacgctttgtcctggtgttctgaggcagactctctgtaccaaccgtgtgtgactgctgatccagctctgcctaaatcagatcactggggtctttcatcctttggggaataagctcctttggagaatcaagccagatcttgcctgttgggagattaaataagttgccctgtcttaaagtttaaaattaagtgcatattaagcaaatgacagtggaggccactgaagacaccttaggcctggaagcatttcagttagagaatgtttcagggactccacacacattcattccccttctccactccaccccactgtcatgccatcctgactttccactcactgtaaggtgcttcagaagacccaagactcaggctgccagagtggctgagttgggtgacttgggggttgtttctctcccattcatgtctgagatcatgaatggtcctctgggccatttcttgagtgtttcatttccaaggcctgtcagagggaggcagtctttagcattctctgactgtgctggtattactgggaaacaacagtcttctcttaaaaggcaatttcagaaaacaactgcaactgaatgactcaggaagagaaaggaaaggggaataggatgagtgaaatgtatggcccaagagcttttggagtctggaagaacaaaggaggaataaaggatgggtacgtggcaagaggagacccatgttacagagtgtccatgatcatgcagtgaccatccagcttggctctgctgtcgcctgcagagaatacactaatgaaacaagtgagtcttgggtgaggggtggtgtggaatcgtgcttggtggaagcatcttttgaatcacagggtctttcatgctgatccttgaggcgctgaaaacttcacagaactgccatctgggttcaaatggggacatttagaaagttcttcaaattcactcctctcaatgacttttgcccgaagactccaagcccacaattactttaacctgaatgaacagaaagtatcatccatgctgtttaattctcagtggcctcttggactagcctgaaagtcacagctcccccaacccccaaaatataagttaagaaagaagcctgaaggtgatggaataaacactacggcttgtctttcttatttttaggggctctttgagagagggggaatcaggaagtgtaggagtgagcaaagtgattctgggcagaaacctgaatggatatgacaaggacgagggatcctttgtccgggagctggtaaatccctgggggctgcctgtattgtcacatttgcttgcgaggacacctggcattgtatccaccactgccagatcatctctagatccacaagaaccaggatctttggccaggactgagagcaactcacatctgacaaaagcctgttcacctcttaaaagaagcccctttttattttcctagcaggagggtgttggaggtcatgatttctgagcatgctagtgacatggcttttggcatttccattagcatccctgttctagagaatccccatatgctgcgaaaattgatctcaaaacagtatatcatatatatcaccgtctgaggagggacgaaaacccaccaagagtgtgatttgtgggggcccattgcttgagtgtagagggctcagactctgaggtcagcttatgtgcctgagggcagctcacagcaggccctgcagggatagctgagagcctgccctggtcttggaggagaaagagatagggagtgtgcaccaggagacatctacatgttccaccagtgcccagaagttgttgtcaggtttgacttcagatcccaaactgtaggtgctcgttggctgcaatctcacagctttggccacagagtgatagccgttctgcaggcctctctagagagatctgtgtcttcaattgtgaatgactcctcatcaggaagggacatctgggtagcactgcactgagtcccacatgaatgaatacttccaggttgagaggagaaaccaaacccacaaaagcctatgccctgctcctaacacatgtggatatgagtgtacacctaacaatcgcacgtattaaaagatatgggaatatacggactcagaagcctgcaactcatagggaattggggatggtgagtgggtgggtggcttgagagaggagagtaagccagcatgtttacttgagttgaagttggtcagagtcagatattaatggtgtaggctctgaaaattatgacttgcctggagctctggctcaagcccacagaagtattaatagattatttttaatgtatttatttgtttattaattcattcggtaaatatttattgaacacccattcttacttagtagtatattaggctctgggaatacagtggtgagcaaatcagaacccatgtcttcatgggtttcatgccttctagggaggcacacaagaaaataagcaagtcatatacaggataaatattgttatattggaggtataaggatgttattagagcacacgtgagcaacctccaacttggatggaggcttcctggaggtggtgtcatctaagctgtcatctgaaggatgagaagaagttaagacaatgaaggaatgggggagaaagggaagaatgccaggctgagagtcaaggtaggtaaatgtccagagtagggagagagtaagacaagttcatggaactgaaaatgggagtggggaggcgggctaagatctgaacttggagaagtaaatgggcattaaatggtgaaaggcccttgaaaaccattttaagtagtttttgcctttttctggggacaatagggaagtaatgaaaggatcttaatcaggggagggacatcaggtgatgtcatggaaaagttactttgactacttggttttgactcaactggtgggtttaagctgaaggcagggagattgggataatattgccatcatttaggcaaagaatatggtagtctgaaccagtgttgctgtatgagggggtggataaataaatgcacaaaaagatactagaaatccgaaaacatttggtaattgatctctttcgagaggtgagagaggaatctaggataatgcccacttttcttgcttgggcaactgagtgatagtggagttctttactgaaatgaagaatacaagaaaaaagagctttttttattgttatcgttaggatactgaacagttttcatatacagtagcagggtgtgcatgacatccaaaggtagggtgtgcctaggaggcatgtgggtatacagacgtatctggaattcagaagagagagacccactggatatgtccattttggagttgtcatcaacatataaatgatcattgaagcccttggaactgggtgagtttatataacaagagagtatagaaagagaagagagcttggaatagaatccagaggaaccccaacatattccacccctccagaacaatcccaatccacgatggagattgaggagttgctggaagaaataggagggacaccagaagagtgtggtgtcatggaagctaaaggaagaggtttcaaaaagaaaaaagcagtcagttttagatggtgctgagaagtcccctaagaggcagactaaaaaatgtctgttgctcttagtgacatgggagtcgctgggtatcaaaggcaaacagttttggtgtcagtggaatgatagaagcaggagtgggattacagtgggttgaggagttagtgagcaattgggaggtagaggcaacgtgggtaggcagctctaggagtggaggaggtggttagttagaccgatccaagcttagggtacagcaggctggtgaaattgaaggatcccaggcaggggagttcaggaattggccagaagtcagtggggagttggacgacgggccttgaagtgtgggccgaatatgaaagaagtaaggaaaggaaaggcattctagggagatttttgaagatcaaataatgggtttggtgggagtaactggatgggagaatttaaaaggtgggaatgaggtttgaatataacactgtagagatagagctcttcttggtgatgaaagacatagagtgttctctataagcacctcctagagggggcctaagtgcagctcatggtacctgtcttagtctgttttgtgctgctgtagcagaatgcctgagggtgggtaatgtatacagaacaaaaatgtatttggttcacagttttgaaggctaagtccaagatcagggtgccagcgtcttacaagggccttcttgctgcaccactccatggtggaaggcgagagggcaagagagagcagagcacaagaggggactagattcattttttcctaaggaacccactcccttgagaacgacattaatccacgcgtgagggcacagcccccatgacccaaacacctcccaagaggccccacctcccaacactgctgcattaagatcaagtttccaacacaggaactttgggggacacatttaaaccatagaagtacctaagttaaaacaccacagcccactgatttaaatatctgtaccccacacccttcttcacccagccactggatcagtgttctaagcagctactgtttctccatcccctaatcatgtgacactgtgatagacattgttcatatattatctctaatctgcccagcaaccttgcatggtgggtactataactctaatacagaaaggaaactaagacccagagatactaagtgatttgcatatgattatgtagttagtaaataaatggaagagtcagaatttgaacccaggtgtggtctgacttcaacaccgaggctctttgctttgtacttctcagactgtaagcttcttggggccaagaagtattttcttatcattgtgtagcctcagggtttgattcctatacagaattgggactcaagaaatttgaggtgcatgagtgagtcagtaagtgagtaactgagtgaggggtacataaagtaactctctaatgctgttccccaggggaaataaagcaccaccacccaaagagagaaatgaagagcactggacagaagaaaggaagagcagaaagatttggccatcaagcgatgctggtgttgggtagctagaacagaggtgtctctcttcactactgtttctaaccagggtgctggacagcctgtggttggcctgagagagtcagccctaaggcctccatctgccccagcatcaaccccaggctccagagctgtcaggcagtggcccaaaaactccagaggaggagctgaaaggggaggtacctaagaaacaaaacccacatgggaggagagaaccccaaaccacgaagtgacattctacttcacgtttccttttagtgtcggcatctgaggctggggtttctctccagaccctccttcagagtgcccagggttggcgtgtctgaatgtgtgagagtgttgggagggaccacgctgcccatgaggagcatgcacaccacctgacatgaccttgaactccagccagatgcctaccagacactcgtcttccttccctgaaactgatttatagaatcaggagagcaacctacttgaaaggagggtagttccagatgtgggggtaatgggaaatggtagtgggcaatgtgctcttttattttactatttttctttatcatatcatattcctctctctccctccccaaatagcaagaaggacagtatcttccttccaggctttaaaatcccttgcatgcagcctgacgttgcctaaaagcctctccctcaggcctacggactccctctcattgcttgcctattcagtaagcctataaatttactgtcccctgtccaccaccatcaccaccagcctgttgtggcagggaaggtggcctggtgagcccagtggactccagcaggactgcagcaaggggatactgctttgtgcagcagccggagcagcgctgtccctgaggtctgcaggaaagtcctggggcccaggaagacagtggcccatcacccccagtattgcacatcaggtatcccccacctgtgtgcaccatgcacacccccaccatccacctcctgggccccatgtgctgggggaaggtgtggtcagcagacaggggaggatgtcatgctgacggagccccttagaacaataggagcttcacaggatcacaaagcctatcccccctcaggttacagaagagttgaagtccagagaaatcaaattcatttgtgcaatcctttatccatctattcgtccttctctccatccaataaatattcattgaacacctgtcagaaccaagagatagagtgctgtataagagaagtgaggtcgcagctctcatgcagctttcattctgacaggtggggaagacagtaaaccttgaacttaaagcaagtctctaagtcttgtgggtgtcacagctgaagactaaggctgggcctcctgtagtgtcctttgcaaggccccatactccctgcttcctgggaggccaagcatttagtttggctctccattgcagatggagaagtttgagggaataaataccagtttggactagatacttctgggcggcagaagggtacaggtagtttcagaccaggattggtttttaattttttaattttggtaaattatatgtaatgcaaaatttgcatttttaaccattttaagaggacaattcagtggcattaaatacattagcattgtcatgcaaccatcaacacacactgtatctccagaactcttatcatcccgtaaaacagaaactccgtacccattaaacaccaactccccattccttccctgactcctagacagggattcttaacttttttgtgccattggctccctggtcagtctggcgaaacccctgaactcttcctcagaatcaggtctctaaatgcagaaagtaaaatacataggattgtcatggaaacttgaaatacaaatatcaaaatattttttaaaaaccatttgtaatatagtaatatgtgtgattctttgttatcccattaaccaataacatcaggctgtaattgaataactaccatatttttgcgggagtggcttgcatagatgatattttgagatgactgcaacatttctagtgcagtgtgaaaatacctgtaatgtctaccggtgaccaagtagttaccagtactgcccatatgacttggtggttgcttatattcctaatggaaggagctactgaatttcagttggaggttggtgaaaataaagatgtcacttttttcccctctctgagttcaccaatctcctgaattctgtccctggacagcttaggggttccgtggactccaggttaagaagccgtgcctagacctgagctcactccccttttctgcctagaggggcagtgcacagtgcacggggctgggagcgtgttgatacgtaggatgtcgtgagtgaagcagtccctttgcagggcatcacaggagcccagccaaggggaaaaggtgcccccactctccccaggccgccagcctgctgtctgaggtgggcggggccggtgccccctagaagtgtgccttctggcagcttcccccgcccccttccaccctcttgtccaagggctcaatgcagaagggagccatatggtcctttgtggacacattttccctagtacagtatcttcctggtgtgaatgcaggcctggcgggcgccctggtgtcagctgtccctccccttccctggcgccccatcccccatagccagcccagagagtagcaggttgtggggagtcggggagccctgcagagtcggggtgagtaaggagtctttcagtaacacccacacacacactcacacagaaaactgtggaagtgaagtcaaacgtctcaaagtcagatccctttttggtatgaatttgctgtgtctcattctgggcactaattccaatttaattgcgagtggcctgaagcctcttcaataggagtaacaaatggtttgattttgtaaacttcatcagactgcattttaaatgcgacacagtagcccaactcgaatgccaatgaagcactggagtagctctctgtttactaattatccgtttttactccaagccacgctggctggcttgtctgattaaatcggatttgtgggatagagaacagctagcagagttttctctatagtaaacgagattgaaactatgggccgcctggctgcacactgtaaattatatttccttttaaaggggacgtgtctcttttatttctctgtcatccctcctgcatattaaactttacggtacagaagtatacccggctgcttctaaatccagcctctcaccctccacctggtagcccactctcactttctgtgatttccgtctccttctctgaaggactggaaaggaaattcgtagctacgttctctgctcctttatctttttaacccttttcttttcttcctctttattctggaattggcttttcattattccattattttcaaagatacctgtgatgacatggatgcttagaaactatattgagttagctaaaagagagttctggcaacagaatttaccaggacctaacacagactgggttttagctttttagaaggatgtgaagatgggtggtattgggccggggcaggcaggggttgggcatgaattggtaatgatagtttgaattgtgaaaaaagagtcaatttctgaaaaatcaaatgtgttcctttggttcacctggaatgatgaaatcccttcctctgaacgcagtgaaatcagaatcacctgatttctacctgtggcccagcggagaaggccgtggggcaggtgttggaagggtgaacgttggtggtcccgccctctcggttgaagcccaggttggggcagtgggtgtgtcctctttctactccctggctggttctgggtctgacgtagagctcctgggctcgatttattgtttattcctctgaccctaggaaggcaaaacaacctctgtccttggtccttcctgtaatgtgcacgtgcatgtgcaacacacacatgcacacacatgcaggtacatgaaacaaacgcaaggagccctgaatcaggtgtaatcagactgtgcgtacattctgccgttgctaagaccaactccatgagctcgacctgccctgccctcattcttggtatctatgtatgctctgggagcttttttatattttaatttgcttctgaatgtcctgcagaattaacagtatctgtctgcacttttccctttttggctattgtgtgccgtacagtacgggaaggccgcatggtgtctctgatattgatagcctggttaccgtgggaatgaatggccaccacactctcaggcccacagccctccttttaattgttgacagtaaaaagcatttaaatgctgcttaatttgtaatcatcttctgtgggggggggggcggaaaggagaggagccattaaaatgtcagtaaaatgaatacatcctctccttttttgttattttgttttgcttatttatatggggtagtttttcttttcattgcccagtgtttgggagatatttaaatggcgctgaaacaatcagtatttcgttttattttgaatttctgtctcgcccaacccctgctcccctccccactccattctgtctccctgggcctttgtcttgcctctgtctctctctcttttctgtctgggtctcctcctgcctcctgcctctgcctccacctccctatctctggaatacattggggtttactggaaattttacatgagagcctagccgaggtttttgggtttttttcccccagagaacctactcctgggctgcagtttctctgcaggggcctcaggatgactttgggaatgtctgaaactagagagagtgaccatctatagaaagcatcttttacacgtgaagtatactggagatgaaagagtcctggggataacttattgttcagacaaggaaattgggtcttaccttcacgtggaaactccgtgcctcccgtgaagctctggacacacagccagaatgtaaatgcctactatgtgttggacactgtgctcttgtaatgaaactgctagattcagagggtctggttctctgacttgctctctatatgggctttcttgggggtcttctctatcattctgctgctgggggcttgggagagaaagctccccctccatattccccaccccaactgctcagccctcacctggcacagagaggcttcgggtactctcagacccagctactcaataattgcctctgtgagtgttcagccagttctaggaggtcttaagctgctaactggtagtcccctagaaaagggacctagaggttctctcaagtcctgtgaaattttcccatcttcctaaaaatccccatctcacagtgctgcttgagaaaggttgaacctagattggcacccagcaggtgcccagtcaatgttggatcctttctttgccttgtctgtgactgtccctctgtcagcctaagaatgtggttccttttagttaaagagattctctttagctaaaagaaggctgtgaagtctgactttgaaagagaaaatgctgacgtccatctcagtgggagaaaggaccattcaacctgccagcaccctcttcaatagaattgttgaatattagagtggagaaaaaccctttaaggatcacttatatccctcttcattttactgttgaggaaactgaggcccagaaaggtctagtaacccacccaggagtgcacagcgagttagtcactgagccaggacttgaggccaggttttgtactcttgttcctgttcagttgggagtctgcagtaaaaagccacgtgagggcaagaggatggctgggatgtgaagatcctggcctgccctttcatgctccgtcccgatgttcccccacccgctttggggcttcttttcctggaagcctctaagatcagctgaattcgagaccaagggacccatatttcttgcagtgctcatgcaaccttgcagagggttacaggcagaatacatgccagggaatggacttaggaagaaactgattgtagcttttggtttatttgctacccatctacccccaaatgcaggaagtagggagccctttggctttaggaaccctgagagtaaacaggtgcctgtctctctcctttgaacttcatttctacagaacaagcagtgtagagaaaccgaggaaaacagttctctgcatcttgggagaagttgttgagcacggggccctcaagtcggcaccctgcctacttgctccatcccacagtccatcattctcccagcctgatcccatctcagaggcacctctctgccagaacgggcagtccctgagagaggcttccacatcagatgccccacccagggttgggctgggttgggttgggctgggctaggctaggcttgctctgcagagctgggctaggttaggctactgcaagctgcccttctcctctctgggttgttgaagttggtccgatttttcaatcgtgggccaattagtttcacaaatgggggcccccgtggtgccagggcacatttgttccgggcctgcgcactggccaggccccattgttctgcctcccacccccgtgtgggcccattgtcctcgcccccagcgggtgctgcttactactgatttatacgggcaggcgtcctgcgggctccaggcttctctgccacagctggcggaggtgcttaaggccttggaccccgtgacctttgccctagtcctgctgtcattttgaaagttacagaccagagggctgcatacctctccggatttactttccaccccaactcatcccccccgccccacccactctattgcacatacgcatgcgcgcgcacgcgcgcgcgcacacacacacacacacacacacacacacacacactctctcacactccctttccttcttcctctgcttgctcttggagaagttttaattcattttggaatgtctggaagggtccagccactggactggaaaccaagaagaaggagctgctggggcaggtgggaggtaccagccgaggatattagtctctgctgatgtgcttggaagcagctacttcccggaatgtggtttttaatcctcggattcattagttccatatctgatgctgggaggaagggaggaggatgttgctgtcggtgtggcactgccagggaatcaggacttgatttggcttcttgcaacttaacatgcccccttcctgccagaggcccctgcaccctagaaagggcaacgcagcgtaggaggtagattgaatgtgaaggtggttttgtagcccagtacgaaaatgcagatcttgtcccctcttaacccgtttattctctctctccttgcaaaccaaacttctctcctcctttttttttaaaacctccttccctttttttatccaccccttttcttgtccccctccctcattttctccccctcttgggctggtttgttggagtgattgacaaaattagtaaatccattcatgttacttttattgtgcaggtctcaataaatcccccatgtccagggcgcaccttaatgagctagtgagctgacaaatttgtttactgtagctggaggtgccgagtaatgaaatgcacttgtgtctgcagctcactgctaaacaaatacacggttttccgggagccagctctgctagctgctgctgcctgaggacacagccacattccccaagagactgaaagttgtatgtgtgcatatgttttgaaaaatgtaatcactctctcatccattgcttagttttaaaacaaatctgaatcagctgctcaaactcctccccttttttgttatgcaatgaagatgcttttgctcccttgactgacggtattgaaaccgtaacattccccttttctcttgtggaaatggaatgtcatacagatgtatagatgccttccatgattctacgcagataagaaaggaaggaaaaaggggcagagagggctggataaagagacctaaaattgacaaggacgaaattgacaagtgatgctaaggtttttggctcttagcttggtttgggaagatgtaactgaacgcctcagcagtgggtgactctatatgcaggagacaaacacccatgcatgagctcaaagctaattgagtttgagacaagtcttcgaagatggtatctttgtgtattctaccccagtaaaaggaactggggaacttgtctcccactcaccagcagctgattggagtttccagggttcggtgggctgatttggccttcattgcccacatagctagccttctgaggaacgccaggagtacagtagtgcatctctaatgatcctgaaactcatgcccaagaggaaaaccagagaactaaagagagggctcttggccatttgtccagtagattccttgaaaaggaggtgagccctaaatgatagcacagtggaagtcaaaatggaggagccactcagattcaagggctggactttgttcctttctgtctattcctcaccccaccccagccttctccatccttttaagatgcagacagagccttccttccttgggtgggagtcagcctgatgctgcttgcctctgcctctctttctctcttgccgagtggatggtacagccctgctacctttttcagcagcaacctgggggcaaagggaggagaagatgggtgaaaggaaaaggcgtcagtttatatgatggtttgaatgtgtggtcacgaaggttgcccatgctggagatggtgtcttaggaaagagtaatcccccaggatgtcagagggagcagaaagacatatctgaaggatttgggggctgggggtggagggagggggaagtttctagtttaaatcaaggttttcacaccctcctaaatttgatattttctttctgtggggagaagaagctttcggggtggcaggggaggcagtccttcctttgttgggtgaggttgggtaggattggacgtgagaagcccctccggggtacatgtgcatgcacgagcacacacgggcatgcacacaccccagcacatgcacacacagcagtcccagcctgcttaccaaaaaaagctggagtatatttagatccctctgctcctttgattaagaaactgcttatagcaggagataataagagctttgctccaagaaggtgtagcacctgaacatcttctccagctgtgtacccctctgatcctcttccttcccatctattaaagagataattggtatggaaatggcacaggtgtaaacatgaggggttttgtgtttcataatttcagaccccgtcatcacctgggtgaaataccctaggtctgtgtcaccccttctgcctactattccaccctggcctggctttctccctttctctctctttctttctttccctctccctttctttctttctttctttctttctttctttctttctttctttctttctttctttctttctttctttctttctatctttctttcttttctttctttctttttctttctttctttcttttcttttctttccttccttccttccttccttcgttccttccttccttccttctccttttttttttttttgctaaaattaagcttgttttaaattggaagactttgagtcatacatgccctgtagtcaaaactggcagtgttgccactggggggtctggtgtgggtcaccttctctggagatagaattgatgcaaatgtggtcccagatatttgcatggatcctgcccatattactaagagtcatgttccttgagtcttgatagcatcatcctttctacatgcatccccttttcctacttcagattccctttgagcagataccctgggagtccaggctaagactgagtcccattcattcttcagaacagcagaggtgctaattccttgacctgaaaaattattttcttgggtcaaagctgacttatatatctgatttacattgaaatgtacagattgatagaaaacaatacatttttaggatttacataatcaaaaacatttgtcagttgcatcataacagggctatgaagttagggttggaaagggcaggttagttatgaattctcttatcctagatgaagaaaccaaggttaaggacaaccactgcctggactaggatcacaaatccaagaagggctgtacctctgggccagaattgggatctttggactgtttcactgtataatatggcaaaactgatccttctatggtctgtgtttttgcttccgagcaacagagctcagacatggagtgacaacgaaggagtcctgtccagcccaccagacagacacggggggcctcagtgagatccgctgcctgtgggtcacttgtcattactgatttccaaggagagtcttgttggatgctcttagtagtggtttcatttgtggactgtagtctgaactttcctcatccctagccctctgtctgtaccatgactctcctcatacctcctcctctaccctttgtgattgtcttacaaccccttatttattttctaattcaacatgcagttattaagtgcctactccatatcaggctgtgtactgtgtgttggggaatataaagatgaatacaatagttcctactttggaggcttataatctattaggcagagctgaaagtccaaaataaatgcaatacagggctttacgtgatacaacagagctcagaggaagatggtgttgttggcactgaatcctaagtggtgtaactcctcaaagatgccttctctagggtcagcttcccagaaagtagcagcccaaagacaacaaaacagcttaggcatgtgtattgtgcagggctgccatgactcatgatccaggtcgttcactgcacaagggtgcccagctgaggagggaagatcccaaaaccctgccctctctgtactcaccataaatatgcagccaggtctgtggggctggccagaggaggagacgtgattttctaattcagatgaaggtgttgtttggccatcattggctctgtgaccacattataaagttttttcgtgtggatatctcattcgatgttcttgataaccacagtggcagataaggagcaaatggatctggtgaaaagaatgacttgctcggggccacaaggcaagtatgtgggagagctgggacccctgtgctgcttttccttcccctgtgtcatgtggaccatctgacttctgagggtctcgtttatccagtcagagcacctcccctctccccagtggtaccaggcctgacgtctctccatagcagaggacggaacccaggcgttgaagggagcagagcgttccagtgctgccgggcccccctgccccgccgcacatctcactgcagctaatgaattgctaatacaattttctagataattttatttccatagtcccacattttaatgtgtttccaaaagctagcatttatttgcttaatctcccagtgtaatagaatctgccctgactcatcatacatgcgaacaatcagctaggctgaaacgccagcaaattgtttaataactcacatctagtctctagatttttaactcgcatgcaccaatagcttttcttgtgtctcatccacatctcccccacttttccatttttttaaaaatacttttctatcatcatagctgttagtttctaagcagaaaaatggggaaagtggatgctgagtctcagaggctcccctttcttcccctgggagccttggttggtggatacgtgaccaaggagcacccctgcaccttgtggaatgtcccaggaaggggagagagaccactgtagggacatcatagtgtttcctttccagctggtgaccatatgacttccagcctgttggccagttgtggaactggccatctgggattttttgcgtgccactcctcccttgctgtcccacctttctaggattttctctctccctttgccctggcagcctctgccctggtctggtccctaccctcctccagtggcccatcagccctctcgctgcttctaaccgcttgctgctgctgttggtccccatgtgtgcccagagtcactggcttcaaacacaggtcagatcgtgctagcaccactcgtcttagtcaagtcaggctgctataacaaactgccacggactgggtggcttatacacagcagacatgcatttctcacagctctggaggctgggaagtctgtgattggggtgccagcatgttcaggttctggtgagggtcctcctcctggttgcagactgctgatttctcggtgtcctcacgtggtggaaggggctagctagctctctgggccctcttttacaaggacactcattccattttaattacctaattatctctcccaggccccacttcctaataccatcaccttaggggttaggatttcaaaaaaggaatcagagggggacccagacattaggatcatagcaaccctcggtcctttcatggcactgcattgcctgtagaataaagtccaacctgtcctgcctggcatgtgcagccctctgatctgactcccatcaccctcccagcttgtctccatccccagggcctgaccttggccccatctgctctgacatttgccagtggtgtctctctccttagcctggcacatgtgtcccaacttcttgtcctttgcttctcagatactcaacttttaaaagcctaactcaaaatctcaggagctcttggagtcgccctgccttaccctctgggtggttgttaactcagcatctcccactagtctgggacccagtttctctgctcagccttagcctgcccctggtcacctagcacagtgcctgtacttggtagtggctcagtgagttggctgaatggacatgaagtgggttcaggccaccctgagaagtagggacagcatagtggggcagtatcgaggggccttggaaagaccaagggggcagagtgctgcagtctgccttgctgggtgtattgacactcagagcacctgtgggtctggctgtataggctgagatgtcctattgggaatgccattcatgttccctctgcccaggttccttccatgccggggatctcagaggatgcataaggagaagccttggctcttaaagggcatggctggcctccaaagcctactcaaccctactgatttaaggtagctgtttgaacacctggcttaatttgggctctctgtggggtgggggttaagggcagagagggagtagatgctgggggctctcaagttgaaggagtgggggccaccgggcacagaacgcattgcagatgcactgtcctcctgtgtacgtcggccaagcagggagggatattgaagactcactgtcaactcttggcattgcttctgtccagaaagatacatctctcattatgtctccctccagcaagtgaagctgagtagactactcagcatttctgagagaccttggtggctcccagtgggattggaaggcctcagagagctatgccttgtgacccagccccagctactgcccactcctggccaggggttctctagccattgctggagctgtactagaggcaggagtcctctgtaccgtccttactgggcttcttccagggtaagcccagacaggcgggcagtcagctccagaggtagcattgagtccagccccgtggtttctgaaagacaaaccgagatattttcagatcccaactctgcctctttctgtgtgatcttaggcaagttatttaatctctcttttacactggtaaaaagggggataagaatgcctgccttgtaggattgcaagttttaaatgaactgacaacatagataaggtacctagcataacgcctagattcgctccccttccttcctgctttttgttggccaggagcaaaatccagtgctggctgtttttctccttccctgctcagccttcctgactgctggtgagatggggcgtggctccaggtgcttagacttcagtgtctgcaaagggaagggatatcagggtgggtgtgaggggcacagaagtgtgggggacagtgagaggtgggccttgcctgcctactagtccatcctaacccagccatgagtgggacggaggtggtgaggaccagacctctcacttgctatctccattgatggccaggaaggcagggaggttcttcgtgccatcccttctcttccccctaccttccaccagacacttcccgattccatgctgagcagcccatggcttccagcagccaaagctttaccccctccccccacccactctggactggactgacagatgctaggcctacttacgtttcctgcttgtgccttcccacacaggggacagcggtgtggggccaagtgcaggtgatattgcccaggcaccagcacagagacacacagatgggcctgccggggagctcctgtgctcaggaaaacagagcccaaaagggtgggcactgagctgccagttaggactcagacacaaggtcagatacttcctcctgtggtgctgcagctggaaatttcggccatggctccagagcagtgtcagaaagggattggtaacaaacagaaaatggcagcctgtatgtgtggggtactttggggatgaacagccagttagaattaaatgaaaatctcacatcactcgctagctttcaatcctttgacagttgcccatcgggtttaggatggaactaaatctcttgacgtggtttgcaagaccctgcatggcctggcccttgcctttccctttagcctcctcttcttccccagctgcactgcaccattcctctgtctgatcctcccaccggccatgtttcctcctggcccagagtgttcacagacactattccatcttccggattccgccattcacctggtgttctgggtaacgtcggtcatgagagcagggactttgcatgctcttccttggttatatccccagtgccaaaaagacagccttgcttgtagaaggcatcaaataatacttgttgagtgaatggacctaagattcatgctttagtgagtggagaagtagttaaaaaaaaaaaacaaaacaggatctgtagctagtcttgggaaagcattaaaatctagggtgtgtgagtgtgaaccccagccctgccacttacgaactctatggcaggagtccccaacccccgggccatggtctgtgaggagctgggctgcacagcaggaggcgagcgagtgaaactgagctccgcctcctgtcatattagtggcgacattagattctcacaggagcatgaaccctattgggaactgtgcattcaagggatccaggctgcacactccttatgagagtctaatgataaatgtaatgtgcttgaatcatcccaaagccatcccccaaccatacgtggaaaaattgccttccatgaaaccagtcccttgtgccaaaaatgttggggaccactgctctgtgggattttggccaaagtacttaatctctctgtgcctcagtctccttgtctaagggatgaggataacagaggctagctttttgagttttggatttatattagttatgttagaacaatggctggcccatagtatctttgttattgttttttctcgcagggtctaccttgcctcccccactttttgccctgtactctgtgaagtccatctggtatatgctgtcttagtaccttgccgccttttacataccacccgacacagttgcccattacccttgctgctgcgatgtatttgatcaatgtctatcctttagctttagcttccagagctcgggaacgacgtcgattttgcccatcactggggccacatactgggtgctcagtgttgcatagcctgggcccactctggatttgcccctgagcatggggatttggaggtgtgagtcccgacactggctctcactccagatgggtaaagaatgcaccttgtattcccacctttctgaggcaccccctctcctgtctcccacaggcactgacatggccgtcttctgtctgctgtgtgggaagcgcttccaggcgcagagcgcactgcagcagcacatggaggtccacgcgggcgtgcgcagctacatctgcagtgagtgcaaccgcaccttccccagccacacggctctcaaacgccacctgcgctcacatacaggtaggtcagtccagctgatgggtggatctgggtctctgggagccagcgtctatatttacctccaaggacgtaaagtggaggtggtgggctgagtcagccttcagtccttctgctcaaggcttggacgtgcagaggctgcccgtcgtgcaggtaaatgtggacagttctcccagtcccctcctgtggaccgtcggttcaaagtctttccgtgttcaacacaggatgctcattaaaaaggcaggctcttgggtcccactctcagaaccttttattccatgggtccagggtggggtcccagattcagcattattaatatgtattcccaagggattctcatgtaggtagacccaaaatgaattttgagaaaaactgacctgctgggtctcttaacattgtctgccctgcctcccaccactcttgatgccccgccgctctatccatacacatttctgaagtcagcttcgggcttctgagggcaagttgaagcagtgatcctactttccccacagtaacaaaggcctgtacttggaccttaaccctgtttagggaagacaaggagggcatttaaacgatgagcaatgaaatatcactgctcagccagttccaggtgatgggacaagggagggggtacgaggtaaggaggctgggccaggtgctgaggggctggccattccctgccaccagcctctagggcttcagggatggggacacttggtccctgatggccaagaggcatttgctttcctgcagcagctcccagttttccctaacaggggagtggatggcttaaattccttattttctctatgacaaaactggggctctgctgaaactacctggttaaaggaatgcccatttctgagtctgcctttgtgtgctgtgtttgtagggagggttggggtcaggtctctatctgggtatataacagagcgtatacttgtaaaaacctctgcatgccacgtaaaggaacagtaggccctctcctcattttgagagtcttgtcacagctcagagattgagtatgcagaccaggtcttgcatgggtggcaggctctgctaaataagggaagagctttacttctcatggactgagctggcctggccagccagcagcaggtatcctcattaaggagccttcctggctgtcacttctggatgccattttgttcaggggagcacattgtcttagcatcaccagatttgcacagaactacttaaaatttctgggacaggacggaggtagggcccagaggggtgggctcaataaaaagggcccaggagagtgggatgttgacaaggactttctctacagcgattgcgtaagcatttcccctgcagctatatgcaccttcctatgaacgcctccctcaacagttccccaggttcattcggtcttatgaaagatggctagatacctttcagccacttctgagcatgccactgggtccaatcagttggcttcatgtgacttgaatgatctcagtcctgctaaatccacccaggatgtgccctgctctgaccatgccaccttctcagagctcagatatgaaaatgtcacatgctcttgtgtcagtcatggctcagatccacggggaggggctgtttccagagttagggagaagcccttgcttattctaggaaacacggagcatgtgtgctgcctatgcacacacagagaaacacccatcaattttcacaccagcgaggcactgcgcacacaagccatatacaggctgtgcacaccccacacacaatgcctcattaatattccgttgttcttggcccatttgctgctggggccgggtgtttagcatcagcagctgtgtttggtaggttagtccagccgtgctcttggcattgatggatccctgattcacacggctcatcatataataaactctcagctgtgctgaagggaggggctggaagggaggggcctgaggagccagcaggatggggctggggtggggaggacgacagacactgggcttggccagtgccagagaaagcaccaagtaaggacagattggggggggcggggtcacaggtgcactgggcaggctggagggggctctaattagtctcgtttgtcctgcacttaatgtcaagctcattaaagaggctacagagttaatcaacataccacaaattggattttgagttctgcagccagttttgtgtacattatggccacactgacacaatcagctctcagggtgaagatttcacgccaggtgcacaccgtgcttccaaatcgggatggggatacgtgtgtgttggtgactttttctttcttttttttttgttgttgtttgtttttccttctaagttctttttattcttttccctgggcagactcaagaatttcctatttaaactcatttaacatgtgctccacttcataattaaattcctaaaaatcggatcaaacaaactcctctgtcttaaccctttgttttttaaattgttagggacccctctggaggggaaaggcacaggcagccgcccccttcccccccaccgccgccttcacccccacccggctgggtggctgccgatgtacgttttaattaccggctccggctgaagtctcacgtggccttggctttatttatttatttataccttaatgaggatactgaatctttgattaaagtcgtaatcgttgccgattcagtaaggagggggagttggatgtcagaccagacagggctgtgagtgcagacacacggagagagtgggttcgggtgcacacacagactggcccttactgtgttagacacacaactaattagtaccagggtctgcacaggcctccactcccttgagtttgatggggctgggggccaggcagtccgcatggctctggcagtgaggatgggcaggtagcaatttccccaactgagaaccctgggccttggcccatccccagatctgcaggtgagggactcgctggccgagcctctgagccagtgcaacaccccatagattggggtgaactggtgtcaaggcacgatgccactctttgagcttctctcatctgattccgtgatggaagtgcccctctcatggcatgggtgcttcttgcaaatcttccacccatgagaaagtcactgatcataccccagcatccgctccccctcagagccgtaaaaacccctcagagccatcagaacagatgagaatttatgtgggtacaggggcctaactttgggaggggggagctttggttagtggcccgaggaggggagagacaggagagagtaaaatatcattttaaaaaggaagtgaaggcacaggcatgcgagtctataacgagaaggacaatttatgcccaggcacgagcgcagtttgacatggggataatgcaaaaacgtaggtcattgtggatgacttaaaccttcagcagctgaagaaaatgtatgaaatgcagaggacattacacggttggcagccccgcacatctgcagagggacaagtgaaatacagtgggccattctttaccataaactgtggttgttggagatgcagcccagagaaattgtaattacagtgacaagacgaatcagcgatatttaaatattcatgaacaaagtctggggtgatcaatctatctttattgtctgcgccttcactcctgtaataaataagtagctggagtcctcacctttcatcccccaagccccccactttggatatgaaaggcaagatggttattctccacaccccaacctctcatgctctggagatttaagagtgggatcctcaaaaaagaaaaggcagttctctccaagtttcatagacccaccatttcctgggtctgttctggatcctccctgtgcgatacactgaggctacaaggatgggtgaggcttgcttcttatcctggtggtgcttccatgctggaggtatggtgggcaagccagtagatacagcatagtgtgtcagcaagctgacaagtatatggtaccctgactctagagccagacccaaacctgaatcccaactcagctccttacttgccgtttcaccttagggatgatgtggaagcatctcatttttttctcaactgtaaaatgagactaatatctttctttaagtttgttgccatgatcatctgatgcgatcacatcacacatctgagtgctcaggaaatgtagcccattttaatgcgaaagtggcataaaaatgataccacactaataacagaacaaaattctgggcatttcttctctttggggacacagaagaaagtgtgattcattctgcctggggaactaaagggaagcgtccacgcgggggtatcatatgagctgggctttgaaggatgattaggagttcaccagggagaaaagaagaaatcgagcagaggaaacagctatgtaagactgtggaggaaggaaattggggactgtagaaggtgtttgggggacaatgtgaagttcctcaaattggagagatttctttgaaggttggggagtcaggctggagtgactttcacccttaacctaaaggaaggggagaagaggtcatctgagaagcaagatggtgaggtctcatgtatccacaagggggcttgctttctggggactgctgtccatccctgaaccaaatgggctctctttcccaggactggcccttgccccacagatgatcatggggccacagtaaagtatggtcatgtgtgaagacaggtattgcttgtttattcaatggaggtgtggccgtggatccttaagttgtctttggaggtggtgaatacaggccgtcgcatccttctcatgcacagaatgtgccctactgtcccctgaagagggggcagggagaggcaaaggcctgatccagccccttgtctccacaggcgaccacccctacgagtgtgagttctgtggcagctgcttccgggatgagagcacactcaagagccacaaacgcatccacacgggtgagaaaccctacgagtgcaatggctgtggcaagaagttcagcctcaagcatcagctggagacgcactatagggtgcacacaggtaccgaaggccagggaggggcctgagctggctctgggacctgggcggaggtgggaagcagatagtctcctagagaagcctaagtgaggatgatcccaggctgaatcaaagagtagaagaggttctattaagagctggtatggtggcctgaggaccaccacacccagtcaaggtggcctgagggccatcagtcaaggccaaggcagacattactaatcaatcccagcacactttccagtgagcccccatcagccctccaggcagctataccagtagttcagaggtgacatgcaaaatgatgtctgtatatgagtcctgaattaggggtaagttggtccaattagctgaaagtgaaggttagggtaatttcatgttactcaagggttagagtaagaattaggatacattgaattaggttgttatgaaggttgggaagttgtaaagttagattgtgtttggttctgagattagaagagcagatatatttaataatccctatatgcatatgatgttttaccacttcagagtgccttcacatttttttttttttagacggagtttcgctcttattggccaggccggagtgcagtggcacgatctcagttcactgcaatctctgcctcctgggttcaagcgattctcctgcctcagcctcccaattacctgggattacaggtgtgtgccaccacgcccagctaattttgtattttttttagtagagacagggttttgccatgttggtcaggctggtctcgaactcctgacctcaagtgattcacccgcctcggcctccaaagtgctgggattacaggcgtgagccaccgtgcccatccacattattttttgtattggaaaaagaaatgtgggccactgttttccctgaggtcaaaagacaaaacaagtgaagggtcttccacagtttcccaagttgggggcagtgaagtcctggagcttgcttgtgaaagctaatttttcacatttcttcacaacttcaagttcagtgacaccaccttagttgcttaaaattggccactgtaggagtattcacatcatagcaatcagcagatgctacaaaccagggctttttggaaagccagtcatgaaacatttaccaccagcacactgctggttgtggggaaggttgatttacagaagggtgagaggtggtggaagctggaaaacaaagacgccccctctgatcaggggagacagctgtcctgtccggaggaagggggagaggtggcttcaggcaggtcctgctggcttagaggagagtacgttgcccttggaggggaagggtggacagaaggagcagtaagcagagctatgtgttgtcagagctcgtttttcgtgtcccagtttgagcccacaaggagagggttgggtgtccgttgatgacaactatagtggcccagaggatttcccagagccctggggtttccttagccccttgtcagggatgtgacctggcaggtggatcattaactgtattggcagtgactattgtaaatagctggtcgatagttagatcactttggctgttcattacttcattatttgctggggcctgtgcgcgggggagtattgatagcgagatggctggccagttaattactgtattgaaacaaggttcccttacatcctctgctcagctctaggggactctatggaaggaaagttggggtatagaacgctagggtgtggctgtgcactcccaggttctttatccctcccatcccaccccacccccaattccagcctcaggagggaggcagggtccagggcaaggtcttagcggttttagcaggataggccaggtgggggagctcatgcctataatcccaggactttgggaggccgaggcaggcagatcacttgaagtcaggagttcaagtccagcccggccaacatggtgaaaccctgtctgtactaaaaatacaaaaattagccgggcatggtggcggcacctgtgatcccagctacttgggaggctgaggcaggacaatcacttgaacccgggaggcagaggttgcagtgagctgagattgcaccactgcattccagcctgggtaacagagtgagactccatctcaaaaaaaaaaaaaaaaaaaaaaaaggccgggcgcggtggctcacgcctgtaatcccagcactttgggaggccgaggcgggtggatcttgaggtcaggagatcgagaccatcctggctaacaaggtgaaaccccgtctctactaaaaatacaaaaaattagccgggcgcggtggcaggcgcctgtagtcccagctactcgggaggctgaggcaggagaatggcgtgaacccgggaagcggagcttgcagtgagccgagattgcgccactgcagtccgcagtctggcctgggcgacacagcgagactccgtctcaaaaaaaaaaaaaaaaaaaaaaaaaagagagctttagcaggataggtgtccccaggtgcagcatatttgaaggactgggttccctcaatttccccccacccctgctccccaccatctgtagccctgaaaggtctcgatccacctgctctctggacggaactgtggcttgaagagccattcctgaggactttggggcctttctctttctagacacccattttcttaattagaaagggaaaagactgtggccttgggagagttaagaatagtaagacaaggagctgggcagtccagtagtcaactagctacatgtagctatttaaattagttacaatgaaataaaattagaaaactgtagagctgcagtcgcaccagcctcattcatagccatgtgtgactggtggctgccgtcttgggtggtgccttcattgtcccagaaagttctgttggagcaagcccagctggaggaacccagcttccctggcacgcctgagggtgacatggtgccctcactgccttctgtctgtcctcactttctcctgccctgtccctccgccctcaggtgagaagccctttgagtgtaagctctgccaccagcgctcccgggactactcggccatgatcaagcacctgagaacgcacaacggcgcctcgccctaccagtgcaccatctgcacagagtactgccccagcctctcctccatgcagaagcacatgaagggccacaagcccgaggagatcccgcccgactggaggatagagaagacgtacctctacctgtgctatgtgtgaagggaggcccgcggcggtggagccgagcggggagccaggaaagaagagttggagtgagatgaaggaaggactatgacaaataaaaaaggaaaagaaaaaaaaaaacagaaggaaaaggaaacctggtagctttttggccttggattctctctgggctccagatgacctggatgccaagccactgcccctcctctgggggcctccaccctcctctcccggctggaggtttgcctgattttctgggatggggttgggtattttgttcactcaaatggtggcacatttttctccttccttcacccagaccttcttttatgtgtccagaaatggaggctagaaagcaggtgagaggtcctctggtcagagccacacggtctgtgccggccttcctccaccaagacccccaggagatgaagggagggaggaggtgagccagaagggcgctcccctgctgatgggtctgggctgggtcactagctgctcaaaatggcagctctagtttgctggcggctgactggggaggagaagggctctgtttctcttcccaccactcagcccacctgctgctttcctctgctttgccacatctgggtgtcccccggtggtctctgagagcctcaggacccctgcccctcctccagctctttgttcccagcctccccttgactcctgtcctccaagtcccaggggagtcccagcccctcagggacctggcggtgtctccatccttctccggttccctagtgggatagctgcctctgacttcagggtccctcctaccctcagccttctgagaacacaaaacaaatccaataccccaccctagtccagcaccatcgtgagcaagattcctgctgcgctgcttccaaaatggaaaagcatcacaactaaatacctaatatcctaccaaacaaaccacagtccctacgtagccctacttcagtcccaggagaaggaatccatgaatgggctgaggttccgagggtaggttgtggatgtctttctctagaggggtcccacacctggaaaagaggacacccagcccgtgggatgagggaagctgggcaagggagaaagttgttgagtcacactggggaccccagatgtagtgagctcagcaagaaaagccaggtccagagagagtcgcacagaattcctgactcacagcgcccctcggtccacagtggagaggaggaggaggaggagcagaaggagggggaggagctgcaggaggaggaggatttgaaagcgctttggccttgtgttatgttttgcttcttttctgtgtcccctgttagcacattgtacttgaattacctcagttttttgtgacctcatgagctttcttaacctctgtatctctttttcggttggggcttggaggaatggggagggtgttcttttctgtttcttgtgtaaattaatagttgtttttatagacttcagctggtcaagaccctccccgtgcccctggagaccagcctcccagctggcaggaactgtgcaggaggagttgatactcaggatctgaatgtgagggccgaggagggcgaagagtgtgggtggggaggggatgttgctttggggtctcatggtccccagagggcactagggagtcacttttggctccgctggtgcatgaagtcacctgtggccaccatccgttccgcctaaaacactctggagagaatcccacctttcttacaatttgctgggccattgaggtttgagggcctgtgtttggatccttgcaactgtgtggtctcacctctgtgcgtgcattctcattgccagaattggtctattttcacggctggtctttggggaggggggcgggatccagcctttgttttgttgtgttggggtgggggtgttgtttttctaaaagctacctcttatgtttgtccagttgttcttttgttcctttcccgcctcccattctgctgctcttcctccctcttttccccaacctcccccgaccctcctgaattttggaaagcacatttgcaatattcgtgtttgctttgggacggaccctccgtttcatctcatgctttatgtgtaagagttttttattattattttttctttcctttctctctctgagaaagttgtggctgcgttttgatcttaggttttacaaagtggtttagggaagcggttttggggagaaggatcacgaggaatgtagggaagccggagggatgggtgctgctgcgacgacccccccgtccctcggccccagccctcctgccctccccttcaatctcatccaccaaatctgaaggccttaaaattgtgtgttgggaggatgtgaattgggaggacggtgtcactagactgtggattagggatggtaaagtagggaggatgctattttgcaactatagtaacgacttagtgttttggaaaggaaaaggagttaaacttgaaatacgtgactagaacagttgtcatgtttataatgtgaaaa

SEQ ID NO: 247 - DNA, 2054 bp, Homo sapiens
gcagccaggcgcgcactgcacagctctcttctctcgccgccgcccgagcgcacccttcagcccgcgcgccggccgtgagtcctcggtgctcgcccgccggccagacaaacagcccgcccgaccccgtcccgaccctggccgccccgagcggagcctggagcaaaatgatgcttcaacacccaggccaggtctctgcctcggaagtgagtgcttctgccatcgtcccctgcctgtcccctcctgggtcactggtgtttgaggattttgctaacctgacgccctttgtcaaggaagagctgaggtttgccatccagaacaagcacctctgccaccggatgtcctctgcgctggaatcagtcactgtcagcgacagacccctcggggtgtccatcacaaaagccgaggtagcccctgaagaagatgaaaggaaaaagaggcgacgagaaagaaataagattgcagctgcaaagtgccgaaacaagaagaaggagaagacggagtgcctgcagcttcagtattagcagagccacaggccgcctctgtggcatcaccagggtttctctgaagaagagggtctgcattttcctaaacccagtgctgctctcccatctcccatcttcctctcgcagcttgatgagccccggtgtgtcccaggagtcggagaagctggaaagtgtgaatgctgaactgaaggctcagattgaggagctcaagaacgagaagcagcatttgatatacatgctcaaccttcatcggcccacgtgtattgtccgggctcagaatgggaggactccagaagatgagagaaacctctttatccaacagataaaagaaggaacattgcagagctaagcagtcgtggtatgggggcgactggggagtcctcattgaatcctcattttatacccaaaaccctgaagccattggagagctgtcttcctgtgtacctctagaatcccagcagcagagaaccatcaaggcgggagggcctgcagtgattcagcaggcccttcccattctgccccagagtgggtcttggaccagggcaagtgcatctttgcctcaactccaggatttaggccttaacacactggccattcttatgttccagatggcccccagctggtgtcctgcccgcctttcatctggattctacaaaaaaccaggatgcccaccgttaggattcaggcagcagtgtctgtacctcgggtgggagggatggggccatctccttcaccgtggctaccattgtcactcgtaggggatgtggagtgagaacagcatttagtgaagttgtgcaacggccagggttgtgctttctagcaaatatgctgttatgtccagaaattgtgtgtgcaagaaaactaggcaatgtactcttccgatgtttgtgtcacacaacactgatgtgacttttatatgctttttctcagatctggtttctaagagttttggggggcggggctgtcaccacgtgcagtatctcaagatattcaggtggccagaagagcttgtcagcaagaggaggacagaattctcccagcgttaacacaaaatccatgggcagtatgatggcaggtcctctgttgcaaactcagttccaaagtcacaggaagaaagcagaaagttcaacttccaaagggttaggactctccactcaatgtcttaggtcaggagttgtgtctaggctggaagagccaaagaatattccattttcctttccttgtggttgaaaaccacagtcagtggagagatgtttggaaaccacagtcagtggagcctgggtggtacccaggctttagcattattggatgtcaatagcattgtttttgtcatgtagctgttttaagaaatctggcccagggtgtttgcagctgtgagaagtcactcacactggccacaaggacgctggctactgtctattaaaattctgatgtttctgtgaaattctcagagtgtttaattgtactcaatggtatcattacaattttctgtaagagaaaatattacttatttatcctagtattcctaacctgtcagaataataaatattg

SEQ ID NO: 248 - DNA, 2046 bp, Homo sapiens
ttcggccggttctcccgggaagctattaatagcattacgtcagcctgggactggcaacacggagtaaacgaccgcgccgccagcctgagggctataaaaggggtgatgcaacgctctccaagccacagtcgcacgcagccaggcgcgcactgcacagctctcttctctcgccgccgcccgagcgcacccttcagcccgcgcgccggccgtgagtcctcggtgctcgcccgccggccagacaaacagcccgcccgaccccgtcccgaccctggccgccccgagcggagcctggagcaaaatgatgcttcaacacccaggccaggtctctgcctcggaagtgagtgcttctgccatcgtcccctgcctgtcccctcctgggtcactggtgtttgaggattttgctaacctgacgccctttgtcaaggaagagctgaggtttgccatccagaacaagcacctctgccaccggatgtcctctgcgctggaatcagtcactgtcagcgacagacccctcggggtgtccatcacaaaagccgaggtagcccctgaagaagatgaaaggaaaaagaggcgacgagaaagaaataagattgcagctgcaaagtgccgaaacaagaagaaggagaagacggagtgcctgcagaaagagtcggagaagctggaaagtgtgaatgctgaactgaaggctcagattgaggagctcaagaacgagaagcagcatttgatatacatgctcaaccttcatcggcccacgtgtattgtccgggctcagaatgggaggactccagaagatgagagaaacctctttatccaacagataaaagaaggaacattgcagagctaagcagtcgtggtatgggggcgactggggagtcctcattgaatcctcattttatacccaaaaccctgaagccattggagagctgtcttcctgtgtacctctagaatcccagcagcagagaaccatcaaggcgggagggcctgcagtgattcagcaggcccttcccattctgccccagagtgggtcttggaccagggcaagtgcatctttgcctcaactccaggatttaggccttaacacactggccattcttatgttccagatggcccccagctggtgtcctgcccgcctttcatctggattctacaaaaaaccaggatgcccaccgttaggattcaggcagcagtgtctgtacctcgggtgggagggatggggccatctccttcaccgtggctaccattgtcactcgtaggggatgtggagtgagaacagcatttagtgaagttgtgcaacggccagggttgtgctttctagcaaatatgctgttatgtccagaaattgtgtgtgcaagaaaactaggcaatgtactcttccgatgtttgtgtcacacaacactgatgtgacttttatatgctttttctcagatctggtttctaagagttttggggggcggggctgtcaccacgtgcagtatctcaagatattcaggtggccagaagagcttgtcagcaagaggaggacagaattctcccagcgttaacacaaaatccatgggcagtatgatggcaggtcctctgttgcaaactcagttccaaagtcacaggaagaaagcagaaagttcaacttccaaagggttaggactctccactcaatgtcttaggtcaggagttgtgtctaggctggaagagccaaagaatattccattttcctttccttgtggttgaaaaccacagtcagtggagagatgtttggaaaccacagtcagtggagcctgggtggtacccaggctttagcattattggatgtcaatagcattgtttttgtcatgtagctgttttaagaaatctggcccagggtgtttgcagctgtgagaagtcactcacactggccacaaggacgctggctactgtctattaaaattctgatgtttctgtgaaattctcagagtgtttaattgtactcaatggtatcattacaattttctgtaagagaaaatattacttatttatcctagtattcctaacctgtcagaataataaatattg

SEQ ID NO: 249 - DNA, 1746 bp, Homo sapiens
gagcctgacttcagcgctcccactctcggccgacacccctcatggccaaccgttacaccatggatctgactgccatctacgagagcctcctgtcgctgagccctgacgtgcccgtgccatccgaccatggagggactgagtccagcccaggctggggctcctcgggaccctggagcctgagcccctccgactccagcccgtctggggtcacctcccgcctgcctggccgctccaccagcctagtggagggccgcagctgtggctgggtgcccccaccccctggcttcgcaccgctggctccccgcctgggccctgagctgtcaccctcacccacttcgcccactgcaacctccaccaccccctcgcgctacaagactgagctatgtcggaccttctcagagagtgggcgctgccgctacggggccaagtgccagtttgcccatggcctgggcgagctgcgccaggccaatcgccaccccaaatacaagacggaactctgtcacaagttctacctccagggccgctgcccctacggctctcgctgccacttcatccacaaccctagcgaagacctggcggccccgggccaccctcctgtgcttcgccagagcatcagcttctccggcctgccctctggccgccggacctcaccaccaccaccaggcctggccggcccttccctgtcctccagctccttctcgccctccagctccccaccaccacctggggaccttccactgtcaccctctgccttctctgctgcccctggcacccccctggctcgaagagaccccaccccagtctgttgcccctcctgccgaagggccactcctatcagcgtctgggggcccttgggtggcctggttcggaccccctctgtacagtccctgggatccgaccctgatgaatatgccagcagcggcagcagcctggggggctctgactctcccgtcttcgaggcgggagtttttgcaccaccccagcccgtggcagccccccggcgactccccatcttcaatcgcatctctgtttctgagtgacaaagtgactgcccggtcagatcagctggatctcagcggggagccacgtctcttgcactgtggtctctgcatggaccccagggctgtggggacttgggggacagtaatcaagtaatccccttttccagaatgcattaacccactcccctgacctcacgctggggcaggtccccaagtgtgcaagctcagtattcatgatggtgggggatggagtgtcttccgaggttcttgggggaaaaaaaattgtagcatatttaagggaggcaatgaaccctctcccccacctcttccctgcccaaatctgtctcctagaatcttatgtgctgtgaataataggccttcactgcccctccagtttttatagacctgaggttccagtgtctcctggtaactggaacctctcctgagggggaatcctggtgctcaaattaccctccaaaagcaagtagccaaagccgttgccaaaccccacccataaatcaatgggccctttatttatgacgactttatttattctaatatgattttatagtatttatatatattgggtcgtctgcttcccttgtatttttcttcctttttttgtaatattgaaaacgacgatataattattataagtagactataatatatttagtaatatatattattaccttaaaagtctatttttgtgttttgggcatttttaaataaacaatctgagtgt

SEQ ID NO: 250 - DNA, 472 bp, Homo sapiens
cggccggcctgcacgatgcacacgccggacttcgcaggcccagacgacgcgcgcgcagttgacatcatggacatatgtgagtccatcctggagaggaagcggcatgacagcgaaaggtctacttgcagcatcttggagcagacagacatggaagctgtcgaggctcttgtttgtatgagctcctggggtcaaagatcccagaaaggtgacctgttgcggataagacccctcacgcctgtctctgactctggggatgtcaccaccactgtgcatatggatgcagccacacctgaactaccaaaagacttccattctttatcgactctgtgcataactcctcctcagagccctgatctcgtggagccatcgacaaggacacctgtttctccccaagtaacagattccaagcatgtacagccacggatgttctccagtcctctgccgtagtggccagagctctgagcgggggcgc

SEQ ID NO: 251 - DNA, 1796 bp, Homo sapiens
ttcggtcggcctgcacgatgcacacgccggacttcgcaggcccagacgacgcgcgcgcagttgacatcatggacatatgtgagtccatcctggagaggaagcggcatgacagcgaaaggtctacttgcagcatcttggagcagacagacatggaagctgtcgaggctcttgtttgtatgagctcctggggtcaaagatcccagaaaggtgacctgttgcggataagacccctcacgcctgtctctgactctggggatgtcaccaccactgtgcatatggatgcagccacacctgaactaccaaaagacttccattctttatcgactctgtgcataactcctcctcagagccctgatctcgtggagccatcgacaaggacacctgtttctccccaagtaacagattccaaagcatgtacagccacggatgttctccagtcctctgccgtagtggccagagctctgagcgggggcgcggagaggggcttgctgggtttggagccagtgcccagctctccctgcagggccaaggggactagcgtgatccgacacactggggagagccctgctgcctgctttcccaccatccagactccagattgccggctttctgacagcagagaaggagaagagcagcttctgggacactttgaaactttgcaggacacacacctcacggacagtttactcagcactaacttggtgtcctgtcagccctgcttgcacaagtctggtggcctgctgctcactgacaaaggccagcaggcagggtggcctggtgcagttcagacttgctcaccaaagaattatgaaaatgacctgcccaggaaaaccacccctctgatttctgtctctgtccctgctccccctgtcctttgccagatgatccctgtgactggacaaagtagcatgttaccagcttttttgaagccccctccccagttgtctgtggggactgtgagacccatcctagctcaggctgctccagcgcctcaacctgtgttcgtgggacctgctgtgcctcagggagctgtgatgttggtcctgccccagggagccctccctccgcctgccccctgtgcagccaatgtcatggctgccgggaataccaagttgttgccccttgcccctgctccagtgttcatcacctctagccaaaactgtgtccctcaggtagacttttcccgaaggaggaactatgtttgcagcttcccaggttgccggaagacctacttcaaaagttcccaccttaaggcccatcttcgcactcacacaggggagaagcctttcaactgcagctgggatggctgtgataaaaagtttgctcgttcggatgagctgtcacgccaccgcagaactcacacaggggagaagaagtttgtgtgcccggtgtgtgaccgacgtttcatgcgcagtgaccacctgacgaagcatgcccggcgccacatgacgaccaagaagatcccaggctggcaggcagaggttggcaagctgaacagaatcgcctctgcagagagcccggggagcccactggtgagcatgccagcctctgcctgaaaggtccattaggacatcactcatgggatttttaaaaagcctctttccaggaatggaactgatggattcctctcccactgcctcacccaaaaaaaacggtcttggcggcctaggggaagatcggggaggctggttttgatgaaagtatgttaacttttcttttccacttggggaccctgttcagtatcttttgtagtttcagaagttttttttgttttggttttttttttttaaagaaat

SEQ ID NO: 252 - DNA, 5027 bp, Homo sapiens
aaagcgacaccttctacgctgggtggccagtttccatgtggcttgrtgtgggagcagagacgggacagtggggcctgtccttgttcatccactccctgcctgtgctggttgcagcctcagagcaggcgggagatgttcttggggcttaggctcctggcagagcacatagcaggagtttgtggggtctgaggttcctgtcccagggttccccgattctgtgcctggcctattaatctttctcyggggagcccagtgcccactgccgagcaggctcctgccatcccccatgggcgggtgtgtctgaaggagaatgggatcccggcacggtcttggtttctaacatctcggggtgtgttttggaggcaggcgggagtcatggatgtagatgctgaaagagagaagataacacaggagatcaaggagctggaaaggattttggatcccggctcctcgggctcccacgtggagatctcagaatcaagtctcgagtcagattctgaagcagattcactgccttctgaggacttggatcctgccgatcccccgatctcggaagaagaaaggtggggcgaagccagcaatgacgaggacgatcccaaggataaaaccctccctgaagacccagaaacctgcctgcagctgaacatggtctaccaggaggtcatccaggagaagctggctgaggccaacctgctgctggcccagaaccgggagcagcaggaggaactcatgagggatctggctgggtccaaaggcaccaaggtgaaagacggcaaaagcctgcccccaagcacatacatggggcacttcatgaagccgtatttcaaggacaaggtcacgggcgtggggccacctgccaacgaggacacacgagagaaggctgcccaggggatcaaggctttcgaggagctccttgtgaccaaatggaaaaactgggaaaaggccttgctccgaaagtcagtggtgagtgaccgcctgcagcgattgcttcagcccaagttactgaagctcgagtacttgcaccagaagcagagcaaagtctccagtgagctggagaggcaagccctggagaagcagggcagggaagccgagaaggagatccaggacatcaaccagcttccagaagaggccttgctgggaaacaggctggacagccacgactgggagaagatttccaatattaactttgaaggcagccgcagtgcagaggagatccggaagttctggcagaactcggagcaccccagcatcaacaagcaggagtggagcagggaggaggaggagcggctgcaggcgatcgcggctgcacacggccacctggagtggcagaagattgcagaggagctggggaccagccgcagcgccttccagtgcctgcagaaattccagcagcacaacaaagctctgaaacgcaaggagtggacagaggaggaggaccgcatgctcacgcagctggtgcaggagatgcgcgtcggcagccacatcccctaccgcagaattgtctactatatggaagggagagactccatgcagctgatctaccgatggaccaagagcttggatcctggtctgaagaagggttactgggccccggaggaagatgctaagttgcttcaagctgttgccaaatacggggagcaggattggtttaaaatccgggaagaggtgccaggtaggagcgatgcccagtgccgagatcggtatctcaggagattacatttcagcttgaaaaagggtcggtggaatttaaaagaagaggaacagttaattgaattaatagaaaaatatggtgtcggtcactgggcaaaaatagcttctgagctgccccatcggtctggctcccagtgtctgagcaagtggaagatcatgatggggaagaagcagggtctccggaggcggcggcggagggcccgtcacagcgtccggtggagctctaccagcagcagcggcagcagcagtggcagcagtggagggagcagcagcagcagcagcagcagcagcgaggaggacgagccagagcaggcgcaggccggggagggtgacagagcgctgctgtccccacagtacatggtcccggacatggacctgtgggttcctgccaggcagagcaccagccagccatggagaggaggggcaggggcctggctgggaggccccgctgcctccctcagccctcccaaggggtccagtgccagccagggcggcagcaaggaagcttccaccacagccgcggctcctggagaggagacgagtccggtgcaggtccctgccagggcccacggccctgtcccgaggtctgcccaggcctcccactcagcagacactcgcccggcgggcgcagagaagcaggccctggagggtgggaggcgtctgctgacagtgcctgtggagaccgtgctgagggtgctcagggccaacacggctgctcggagctgcacacagaaagagcagctgaggcagccacccctgcccacctcatccccaggggtcagctctggtgacagcgtggcccgatcccatgtgcagtggctacggcacagagccacccagagtgggcagcggcgctggagacacgctctgcaccggaggctcctgaaccgcaggctgctgctggctgtgaccccttgggtaggggacgttgtcgtgccctgcacacaggcttcccagagacccgccgtagtgcagactcaagcggatggcctcagggagcagctgcagcaggcccgcctggccagcacccctgtgtttaccctgtttacccagctgttccacatcgatactgccggctgcttggaggtcgtccgagagaggaaggccctgccacccaggctgccccaggctggtgctcgggacccaccagttcatcttctgcaggcatcctcaagtgcccagagcaccccaggccacctcttcccaaacgtgccggctcaagaagcctcaaagagtgccagccacaaagggagccgaagactggcgtccagccgggtggagcgcaccctaccccaggcgtccctgctggcttcaaccggcccccggcccaagcccaagactgtgtcggagctgcttcaggagaagcggcttcaggaggcccgtgccagggaggccacccggggcccggtggtgctcccgtcccagctgctggtctcctcgtctgtgatcctccagccccctctaccacacaccccacacggccgcccagccccgggtcccaccgtcttaaatgtaccgctctctgggcctggggcccccgcagcagccaaacctggcacttctggctcctggcaggaggctgggacttcagccaaggacaagagactctccaccatgcaagccctgcccctcgctcctgtcttctcagaggccgaaggcacagcccctgctgcttcccaagcccctgccctgggccccggccagatctctgtgagctgccccgagagtggtctcggacagtctcaggcccccgctgcatcccggaagcagggcctgcctgaggcgccaccctttctccccggagcccccagccccaccccactgcccgtccagcccctcagcctgacgcacataggagggccacatgtggcgaccagtgtccccctgcctgtcacctgggtgctcacagcccaggggcttctccctgttcctgtaccagctgtggtgagccttcccaggccagcagggacccctggccccgcagggctgctggccactctgctgcctcccctgactgagactcgggcggcccagggccccagggccccagcgttgagcagctcttggcagcccccagccaatatgaacagggaaccggagccttcctgcaggacagacaccccagctcctcccacacacgccctctcccaaagtcctgcagaagcggatggcagtgtggcctttgtccctggagaggcccaggtggccagggagatacctgagcccaggacgtcctcccacgctgaccctcctgaagcagaacccccttggtccgggaggctgccagccttcggtggtgtcatcccagcaactgagccaagggggacgccggggtccccctcagggacacaggagcccagggggcctctgggcctggagaagctgcccctgcgccagcctgggcctgagaagggggccctggacctggagaagccgcccctaccccagcctgggcctgagaagggggccctggacctgggcctgctgtcccaggagggcgaggcagccacacagcagtggctggggggccagcggggggtgcgtgtgcctcttctgggcagcagactgccctatcagcccccagccctgtgcagcctgcgagctctgtccggtctcctactccacaagaaggccctggagcacaaggccacctccctggtggtggggggcgaggctgagcggccggccggagcactgcaagcctcactggggctggtgcgggggcagctccaggacaacccggcctacctcctgttgcgggcgcggttcctggcagccttcaccctccctgcgctcctggccaccctggccccccaaggcgtccgcaccaccctctcagtaccttcgagggtgggctctgagagtgaggatgaagacctcctgagtgagctggaacttgcagacagggacgggcagccgggctgcacgacagccacatgccccattcagggagccccagactctggtaaatgctctgcttcctcctgcctggatacttctaatgaccctgacgacctggacgtgctcagaacccggcatgccaggcacacccggaagcggaggcggctggtgtgagcagcaggacaagcactttctcagaagcccgtggccctgctgacgagagacagcccacccccagcctgcaagagaggcagccagaggccaggtatctgctggccgctgactgaccaggtccgcagtgaacagaggcgggcctgccgactgactgtgtggcatggagcatggctgttccccaagtgcacacctgaacacttggaggaataaagttctgtttttaattgtggaaaaaaaaaaaa

SEQ ID NO: 253 - DNA, 3314 bp, Homo sapiens
gaattccggcaggcgcccatggcgggctgagtcctgcccatgccctggtggcctggaagcctgcatgggcgccgtgcaaagatcaacgttttccagaggagcttttgggctcatcactggcctggggagggcttgacacggggttcccacagcttgccccacaccaccttcacacccacacacagcaggtccccgcggggccggtgcaggctgtggctgcccgcgctgcgctgttgctctgtcccggctggctggctccgagtgtggggcgctctgggccggggccgctggggcgcgcacagtggggtgacaggcggcctggctgcagaaacgttgcaccggtgcctgaggtgggaggatgtgatgacgcggcccacgcagcgggaacccaggcctttaaaaagcccaggaaacagcctcagctcaagcggtggctccactggaggaaaacacaccccggtctcacattaaagaagccaaactgtcggcttcaaagagaaaaggcaacatcctgtcacaggccatgctctggcaaaaacccacagctccggagcaagccccagccccggcccggccataccagggcgtccgtgtgaaggagccagtgaaggaactgctgaggaggaagcgaggccacgccagcagtggggcagcacctgcacctacggcggtggtgctgccccatcagcccctggcgacctacaccacagtgggtccttcctgcctggacatggaaggttctgtgtctgcagtgacagaggaggctgccctgtgtgccggctggctctcccagcccaccccggccaccctgcagcccctggccccatggacaccttacaccgagtatgtgccccatgaagctgtcagctgcccctactcagctgacatgtatgtgcagcccgtgtgccccagctacacggtggtggggccctcctcagtgttggcctatgcctctccgccactcatcaccaatgtcacgacaagaagctccgccacgcccgcagtggggcccccgctggagggcccagagcaccaggcacccctcacctatttcccgtggcctcagcccctttccacactacccacctccaccctgcagtaccggcctccggccccagccctacctgggccccagtttgtccagctccccatctctatcccagagccagtccttcaggacatggaagaccccagaagagccgccagctcgttgaccatcgacaagctgcttttggaggaagaggatagcgacgcctatgcgcttaaccacactctctctgtggaaggcttttaggcgtggctcccacctgagtcctgttccctgaaactgggattttaaaatgagcctggaattgagccccaggttcatgcttgtttggagtagtcatttcatgactactctttctacgcacagctagaattgtagacctgtaaaccttccttcccttcttccttcccctccctccctcacttcctccctctcccccatccttccattcttcccctccctcccttcttcctttccaaccccttccttccttttcctccctcccttccttccctccttcccttctccctttccaaccccttccttccttttcctccctcccttccttccctccttcccttctccctttccttctttacctccctccctccctcgcttcttctctctttcttacttcttttttcaattctgttccattttgggaggtaattatagggattttagcaataacattttatgtcaaatgttgccaagtctgtggtccatgggctttcatttctgtcacatttcatttcttggaaaaggcctccttcctccagtgcctgctgaaccatcttagggtcactcacaccctctgtaattttaagatgtatgtggtggccggcgggaagaccagccccgacagcacctcctgagaaagtcagccaagggcctaccctgatgccagagtccttgagctgtcagttcccacagttgctcctttgtttgctcttctcagcctcggccagatttacagtccaggcagcaaaatctcaaggcctggggctcagagtagtaaggggtgggaagtgggtggcagggagaaaagaacatcagggtgggtggggacaggccagtgacgaagagagggacagaggagggatgggaacaggctgtgcatcttagttggagagaggggtgtgggaggaagcttgagtttgatgcagggaggaggaaggctgaggaatgacttggctccagattacttggttattaagaagaacaataaactaaaggaaagcattgcttgaagagatggttttgctgctctccttgaggatacgtgcaagggaagttgggctgttgtaaacagggtgaagggtgtgtttggtcggccatttctctctcacctctaggccctctgctggtgctgtggaggccaagaccccattaagcctaaaggtgatgggtcctcgcctaggcttagtgctaccatgtgggttttgtttctttccttccttccttccttccttccttccttccttccttccttccttccttccttccttccttccttctttccttccttccttccttccttccttcctctctctttctttcttttttttggttttttttgggacggagtctcactccattgcccaggctggagtacaatggtgcgatcttggctcactgcacctctgtctcccaagttcaagtgattctcctgcctgagcctcccgagtagctgggattacaggtgcatgccaccatgcctggctaatttttgtatttttagtagagacggggtttcaccatgttggccaggctggtctcgaactcctgaccttgtgatccgcgcgcctcagcctctcagagtgctgggatcacaggcgtgagccaccgcacccagccttttaccatgtgggtttctttagtgtcttaaaagcgtccataagccaccattctgtggaaccaaggccccctccacgcaaacaccctccctcctggggacctctggagcctcagccagaagtaccattaggtttaattttaatttgttttgctggagaaacatcaggtttgtaggagactgagttgttagcaggtgtgcttagctcttgatagtgaacgtgtaccttgggaactggctcacccacctgctaatagcaccatcgtcactattaagcagacatttcagttggtagaatccatgtagaagtcatggacttttctgggaaatgacttttctgggaaatgacagtttctttgacatattttctttgcccactttaaataaaaactctggagaaaaaaaaaaaaa

SEQ ID NO: 254 - DNA, 413 bp, Homo sapiens
  misc_feature (20)..(20): n is a, c, g, or t
  misc_feature (174)..(174): n is a, c, g, or t
  misc_feature (179)..(179): n is a, c, g, or t
  misc_feature (244)..(244): n is a, c, g, or t
  misc_feature (285)..(285): n is a, c, g, or t
  misc_feature (299)..(299): n is a, c, g, or t
  misc_feature (323)..(323): n is a, c, g, or t
  misc_feature (341)..(341): n is a, c, g, or t
  misc_feature (355)..(355): n is a, c, g, or t
  misc_feature (367)..(367): n is a, c, g, or t
  misc_feature (388)..(388): n is a, c, g, or t
aacagcagtcccagttaagnacagagcatgtgtcagagtgttgttccgttaacctttttgtaaatactgcttgaccgtactctcacatgtggcaaaatatggtttggtttttcttttttttttttttttgaaagtgttttttcttcgtccttttggtttaaaaagtttcacgtnttggngccttttgtgtgatgcgccttgctgatggcttgacatgtgcaattgtgagggacatgctcacctntagccttaaggggggcagggagtgatgatttggggggaggntttggggagcaaantaaggaagaggggctgagctgagnttcgggttctccagattntaaggaaaacaaantctaaaacaaantctggaactctcaaaagtctnttttttttaactgaaaattgtaaat

SEQ ID NO: 255 - DNA, 115218 bp, Homo sapiens
gatcctgagccaagttctctggcacttgctggacatgtcccctgccctcttcccaagaggagtcatcctacatttgggtagttagtacccaggattggttggactgatcaggttagggatcctagagggttaagggaacaacagagatggggctacagcgccctgtttggaaccccactgtccccctagggtgattctgatggtgtctgatgcctggttacaaatcagttttttacccacaaattgtgattattttttaaaaaacagattttagcggaagttagaataaatcctggggcctgggctcctctgttcttggccccatagccttctacctcccagggaggccagagatagaggagaatctcaccagccctccagcctccttccagatgcagtcttgggagtaggctgaaggtgaagggaggaaggctatgggttactctcccttctgaaaggcagctgcaactcaggccataatacacccttttctctcctctttcctctttttcccccttctggttagaggagggagaagtgggaagtagtttgggaactggtttgtccacataaacttccccattgtttcttggcccaccctcagggcagagtcccctgcctaggctgggtaagaaatgggcttgctccagcagggaccctgagggaacaaacccttttccttcggaaaaaagaattcccccttaccatgtagttgaacagtggctaggagcttcccactcccctccctcttacagcaggctgtgtagacttcaattcctatccttcccatcccagctaggtgtcatctgccctttgtctgtatcctatcatgtgtctgagtgtgtgtgtggggggggggggcgggggaggggttgggggtatgattctgtgctaatttccatggccagtggcttttccttccaggcatcactcccacccccccacccccacatactcaggggccaccggcctggcattaccacatgctggggtgattgagggaggggagtggagcttacgctgtcctgtcatcttgagacttttatttttgcatatgtaattcattctgtacaggtagctaactctgtaaatgctatgtattccctctgcccccatggctgcttttgtaaataaactgcatctcctgttggtaaaaaataaaataaaataaaataaaataaaataaaataaaataaaataaaataaaaaataaagtgtagccaagactgagagacactgttttacacctttgattaatttgacaccatcagaattgataatggtgactgcttggatccataaatttgagaacctaccctgaagtagtaggaaccaaaccaacccttaaagctccatcaaccagcagcagcatggacatgtgcccaacatagcatgagaagtacacatttcttccaagtaccagaaagatataaagtgtttatcaggcctttggaaaaatgaagtgctcttgaaaatgtcacatatatatatataacatatatgttttacatatcagtgatatataactctcacttcaagagattatagcaaaggaagacagccagatgaaaatactattaactgaatttttccttggaatagcttccaaaatggagatgagcagcagctgcatttgagttaagtgattcatgtatattgaaaaggtagcatctactgtttgacactttgcacctcctcacatggctcagcatcagtacagttccattaagccagtttgccccaggtatctcggcctttagatctgcatgcctgtttagatctgctggcacaacctcagtagtgccagccaggaacagtcttacaaagtcttacaaagaatcatattaattaaatttaatatttaatgtcaacactcttcatctaggtgacagtgaccaagtcaatgaacgatgtgcaaatggtggtgacctctgcaactctggcactctggtgactccttgtaagtctgtcttgtttatttccacatgtcttctctgttccacagttacacacattgctacaccaccctagttgctccatgggagtgaagggctgatttcactattaggttattcaggacatttttccacctaagtcagcacaccctcagtgagtgcttgaatttcccaactccgcagtcatggggttgactataacagcttactagaatagttagtacttaggaagaaaacctagtaagtactctcaaaaagtgttctgggccatgagaccacgatctgtaaaataaggctaatggaactgggattatatactacagagaagaaggacttggggagggagtacttggggaaggggatatctttgcagtctgtaatattggaagctatgccaaacaacaccttatttggcacctgctaagactataatgggcttagttgccatggatagatgacctacactgggaggctttttttttttttttgagttggagtcttgctctgttgcccaggctggagtgcagtggcacgatctcggctcactgcaacctctgcctcccaggttcagcctccagagtagctaggactacaggcacatgcaaacatgcccggctaatttttttttttttttttttttgtattttagtagagatgaggtttcatcatgttgcccaggctggtcttgaactcctgagctcaggcaatcagcctgcctaggccttccaaatttctaggattacaggtgtgagccaccacgcccagcgggatttttctgattccaaaattgaaggtgatctctctcctttctacccctggactatttagtatatattacagggcacttactatgtgtggcctaaaattctagttagttgtcatgtgtctgtgttttactctggattttgggtttcctgaaagcagtaatgttttgtactcatttttgtatttccagtgccagctcagggtcaggcacagagtaggcatgtgggaactaaatgaataacatgaacaaaagaatacattccctagcagtgagcagttttataaattggacagtgctttcaagaaaacttgtagagtcttattccttggaatatatgacctctaaattttacatggcagatttgactcctatttgagtactacaaaggaagaaaattaactacaagatcttagaatgtttatacattcacccattcaataaatatttgttgagctcccaaggtttcaagcctatttctaggcacttgcaacataccagtaaatgaaatacacaaaatctctacctcataaagcttatattctagcagatagtaaaaattagaagtaaattatatttatgtttcctacttttatctgcccgtctactgcataagtccaggtttaagtccccagataataaagccagatcatgaggaggagttgatgaagcattttgaggactgagaaaagataatcaaaatagagtgtttgggacacatttaaacataaatttgagataggtaggcccaagagaagacatttgtagtagtccagctgtgagctacacagaccctcaatgagaaatttgactatgaagatgaagaggagaatagcacaattaggcacctgaaagatggggcaaaagagaagggaagagtatctagtacctccaagattagctacaaggtaacagaaagtataagcataggagcagaagtaaatttagaacatttatattgattgtgtccacagggtatgtttatttgtgtccatttcaacattcctgctccagctgggttttgtcagcttttgccacttctgctttgctcccaaaccagtaagatataagaatttagtttgctcaagggttctcaacttctgtggtcagtgaaagtccatgacctagcaggacacacagctactcttggctcaccccggaaatatcccaggacagaacatagggggttccacttccactttccagtccctaaagcaaagaaacagtctgggtgtgtgaaaggcaatggctgtgcaagagactaagggatgtaccagaaaaagttcactctccacttgaattaatctggacagtgttgtgcaatatgaaagagcacaaatttggagtcacacagaacctggtaagattcatggttccacgatgtgtgactttggggaagttagttaacttcagagactctgctttatctatagagtaataataactgacagatttgggataatgcatgtaaaaatgcttcagtttccagtaaattttaagaatagagatctaaggctttccctatctggggagctcctttgtaggttaccagatattctgttcctcatggggaggtttaatacagtttctgctcatcttacttgctactctgacaaagtcaccaaaccattatttgaacgtggattgtcaatcttcttaccttctcttctgattttagaaacaatgtgtaaaaattattaaaaattgtagtataaagcaaaataactgatatttattgcttacattttaaataactgatatttattagttacattagttatcttcaaggtaactttatgaaatacatacaaattttagccccattacatatgagaaaatggaaaccaacttatataaggcctcatgccttagtaattagaaaatctaggattaaaactcagttttccttttttgttgaaactgaaagtcccccataaacctaccccacagaaaacaatttgttgtctgcccttcacagaatttttctatgcatatattaacctatatttttcaacaaaaatggactcatacattcttgtttaaattttactttcttcatctataatatgttgtaggcatctttctgtatgtgtacatataaaactacccccattctttttaatagctttgtagtattcttcagtatattgatgaactaacatttatttaagcgatcttttattgataggcatttaagttgcttctaagttttccatattaccatcgatgatgcaataaacatcttgtatttcatcatacactagtgtaaatgtttctgttgaataacatcctaaaactttaattgctcagtaaaatttttttatcttaataggtattatcaaattactttctagagtggtggcaacagtctaaactccaaccatccctgtatgaaagtgtctttttccctacaccttcaacaaaaatgggcagcatcaattgtttttatactttggctattataagtgaggtttagcatatttctatgtgttcactagccaaacatattacttctggtgcaaattgtctcctgagtgttcattctttcattagttgacttaaattattcttacttatttgtagatgctataatgtataatggatattttatggtattttcaaatgcattcgttttgtctgattattaaaattgtacattttaattgtagaaaatcagaaaatggaacaaagtaaaaagtacaaaagaaaaattattttaggtctaccaattaaaatatatatctgatgcatacttgaagaaaattataaaaataaattattaaagaaaatatatgattattagaaaaatttgaaaatacaaaaaattataagaaaaaaattaaacattatctgcaagctcgtcatacttttaacctagtttggattatggcttatgtacaatttcatattctgctttattacttaacagtttattacttaaaagtttattacttaaactttttcccaagccattaaaactttttccaaaactgtaatgaatttttcaacagcttcattgagatataatttatagaacataaactttacccacttaaagtgtacagttcagtggtttttagtatattcacagagctgtgtaacctttgccataatcaattttagaatattttcacaactccagaaagaaatcttatacccattagcagtcacttcccattttttcactggccctaagcagaaatttatcctaaccccatgcagcaataaacctactttatgactctagattaatttgcctattttttggagaacttttaatgctggcttatttgtttccacctactaatatgggcatggatgccttgaaatcctccagatagtatgtgcttagggaaagcaaacataagattagtacagcagaaatgttattacattttttgtattacatgcatttgggtatagcataggtcaaatcctgtcctgaagaaaacagctgcctcacatctggggtctgcagtctagcaaactagtcaaggctagagatgctaaaaatgaagttattcaactgtacaaaagtcgtcctgcttcaccctgaacttccatttggaacaacctccttatttgctcttaattcttcctataaaagacctacactgatggtgtgcatagtcccaggtactcaggaggctgagggaggaggattgctgagcctaggagtttgaggctggagtgagcggtggtcatgacactgcactccagcctgggaaaaagagggaggttctgtctcaaaaaaaaaaaaatggaaaaggaaaaagacctacccaatcctcaaagtatactggaaatgccatgacctaccccctcaaagcctttcctgactctgaggggaatttggatctttgtttccttgtagttttatattagtttaacctcctaggatagtaccttctacattcaatttggttatacctaacagacggaacctgacacatatgagtcccttggctgggcctagagttacagagataaaactcatagtacaagagtcagtattggatagtggtagccagaacatggactctatccttaaaccgtataggttcaattcccagctccatttcaaattaaatttggagcccaggccttgagccttacacgctttgtaaaatgtgaataaattagtacctttctcataaagctactatgaaggaatgaaggagaaaatttttgtaaggtccctaacacaagcctgacatacacagtaagtactcgagtcttttgatgaaattaattggatttaaattgaaagtccatttaagaggaaccaggaaaaaggcttgcaggcttagcctaccagggatcttcctaggctgttgtttgttgaactctccaagtcagtaggtagagtgggtggaagtaggaaaatgacaaaattttttcagtttatgtatcacatccacccactcacagccacaactgtctcacttcctctttttctgtcaccttaaaaaccagagctcaaaaaacactgcttcttattgttcaatcaaaaataagggcggtggcatatagtttattttttgtttgttttccattctgcatgcatgcatgtaaccaatggatcccagcttgattttcaagtacactcttggttgttttagttgactgattaatactattagcttttcacttcagagagagcaactagggctcagtaaggacaaagcagctccactctgtccagtctagaaatggcctctcccaaatgcatttttgagggtaatttcttagaacctgcataattagaggatgtagcagcacgagtggcagtgtgatgtaaataaaggtagtctgggttctagtcctacctctgccactgatcttcactgtgtatcattaaacacattctattccatcactaagcttcatgtttttcccctgtgaagtcaaggcgaaggaggaggactcattgtggtctcaaagggtcctgtaggctctgactttctgtgattttaagtatggatctagaattggtggtgaaggagagagttgagtgccacatagaactctcagctctccatccttagatacctgcttctttctgcactttcctatactgagggatatgacaatctcccatggcttcaccatcacatgtctttgaatgattgtcaaagttctccctctaggcatgatctcccctgaactccagtcctaccttcttcaccctatgaggacatctcactgcaggagtcccatcatctctgtttccacatggctaatcccaaactgtcttctgctaaaaataacccctccccttgaacactttctgagctctgtttatggccttattgttgcccaggacagccatatctacaacatgagtagtatttatgctttccacttagccatgattcactctgccacataaccaaaacctagtcactcttctttccacagtctctggcatccaccccttatactctgatttcactgtcactgtcctgcatttactcatttgttgcaaatccagactggtacccctgcttctactcttgctcatctatattctacaatagagaagtaagggcaatccttttaaaacacaaataagattgtctcatcctcctgttcagatccctccaattgttccttatctcagaataaaagttaaaatcatttaaatgccctacaagaacctgcataatatactctccctcacccttttccgttcccatcttatcttctcccaattttctccttcactccctctgctccaaacccacctctttgaacattctaggcatgttcttgcctcaaagtctttgcgcttgcagtcctccatgcctggaattatctttcctcagatatctgctaagcctactctcatatttcattcaggtttgttcaaatattatttcctctgagaatacatgctatctcgttactctctgtattagtgttacatcactgtcataacaaattagaacaactttactggcttaaagcaacataaattaaccatcatacagtcctggaggtcagaagtctgccatgaatcatattgagctacaatgaagatgtcagaggactgcattcctttctctagggtctagggcagaatccatttatttgttctctcaagcttctagaggccaccccttttccttgacacatgttttcccttcctccatcttcaaagttagcagtgttacacctatttgtgcctttctcccatagtcacatttccccctacctaactgactcctctgcctcccttttccacttttaaggactcttgtgattgcagtggacccacctgggtaatccaaaataatctccctatgttaaggtcaattgatttgcaaccttaactccatctgcaaatttaattctcctttgccatgtaacctaacttattcacaggttctggggattagtatacggacatctttgggggtttagtactctgcctatcacactcttacactgtctatcccatagctctgctttattttacttcatggtactcatcaacatttgacatattatatacaatatacatatttgttagctagatagacataatcaagaaaatcaaatctttctatgaagcttgttaaaatatttccccttccccaagacaatcattttcaactttgttagctgttttttttttttttttttggccagtgtttgacttcatatctctgaataacatgctcatattgctattgttattcttaaaaatctagctctaattcactccctcacctctattcacccaagtcctgcacatacatatatgagtatttcctgtcttcatattccacaacttattattaataaataaattatttatagacaatgttggtggtgagagcaagattcagtgtttatgttactggtatatcatggctgagccatataatatataattatataatgattgattttccttttgatatttgcttggttgttttttaaacttttttctttctattaaaatttaagtttcatgtctgtttctttattactatatcccccaggacctagaacagtgtcagaaacatcaaaagtgcattatatgcatttattcaatacctattatatgcctggtcttacgtctagggtcttgtaaatatcttcatcatggcttctttcaaactaccaacacaatgtcactaaacacagagttaggaataaattcacacaatcagctcttagaatttaagttgtctctagtacaccattggttgaaatccagtcacctaaatttctgtctattcccttcctcttccctgctacagaactcctagggatccccagaacataggttgaaaatccatgggtgaatatgacacctttagagtatagatgggaacactgaggcctagagaggtgaatgaacccgggtctcctaatgcccattcccatgctctttccactgcattatacaaccaatagtctaattagtctctcagttttctgcttccaatttccccatcctattccattgatattctgcaaacagatttggtcctaagaagctgctttcaaccgcagcaggcccccgtttcaccatagaagtttctacggctcccatagaagtctttaagatcaagtctaggcattttggccttattttcaataccctccacaatctggcttagctttttcttctcctgcctttctaaatatacaccaagctaaagtccaactgactctccctgttcatcagaatcattcttgcctttgattgcctctggactttggctctttctctaccacttacctggaatttttccccatcctctttgcctatccaatgctaaccaaatctcacatcccagcccacactccagctcctctagaaagctttcctaaaccactgaagtccatagggattgctaccacttctcaactcccattgtacaaaacagtttctgccattcctttgtcccttaatatgtaaggcctgttattgttagttttcttctaaaccctcatgtttatctttctatgtatttttaggttgatgtttatatgtgtatttctctgtatatgtatgttatatctgtgtttttatttaagtgttcatatgtttatatgcatgtattatctacctatgtcctgcttaagtgtatgaatctgtgtttcattgcttgttttctcatgtctatgtgcaggtctatgtgtatttgtgtgtttgcatgcatattttgtgtgtctgtgcttacatgtctctgtgtgtatattttgtgtgttgtacatcaatgtgctcacgtttgtgcttaaggccatattatatacatatgtatagctatacacaaatgtgtgaccatatgtatctgtgcatttatgtttatttgtagtacttataggggtgtgtgtgtgtgtgtgtgtgtgtgtgtgtgtgtgtgtccttgagcagggcctgtgtggatttactctttgtaccactgcttccctccaactcagtaagcccaaggtgcacatacacacaggagggtctcagataatgtttacacattgataaatttctccaacctgacctttcaacctttgtctagaaaggtgggctatgggggtagaaatagacacagagccacagtgacctctgaatattgggcctcaaagggtgtgagtcattttctctgctgctcacccacattctgtgaactcctaccacatgcacagtatcatctcatgaagcactgagcttgaaaataagaaaaacgtggaccccttgaattaaagtaactatccatctctctcctcttcaaccacttcatcttttctggctcatgccctggtgcatggagtatcaaaggtacaattttttgaaacaccaacttggatggtaaattacacttctgtcatttatcagttgtgtgaccatgggcaggttccacggtacctccagacctcagttctctcaataaggaaaggttattcataatgtcttccttgtgaggtaaggcctagggataatgtgcacagcacagagcaggagttctacaaatggtagttttagtatcactttacctgggaagccttcccacgctactatttccttcactaaatactgcccaaaccacaagttttacagctcagttaataattcaccttgtattagtggttcatatgtgtttgtctttcctttacactaaaatctcacttatacagggaccatacctaacatttcttttctctccctcacaacatccagaaaagacctggaactattgtagaagtggtcattaaaggtgtgaatgaagcagaatagtgtgttacttaacagtatcatttctggaggcatatagctaggagtttgaatcttgtctaggcaccctctataaaagtaagtgatttcaccattctgggttttagacacatttgtaaaatggggatatattgaattcattcattcaacaaatatgtgggctctacaatgaaaaagaaaagtagtgtaagggagtatagagtggtagggagagatacaagagtatgtgcaataatacccacctgaggggttgtaagaaccaagggaaataacccatgcaaggtgcttaattcagtgactggaagagtaaaagattttaaatagcaactatcattatatagttgttattgtatgtatagtatagtttgatttttataaatctgaaaagatacaagcatcaagtataattatgttcatgttacaattagggaagctgaggttcagagagatttgacttgttcaagatctcagaatgaagtagacacagagccaggcttatctccaggtttctgacttctcatccaattcttttactaatcaagagggctactgagcctactgcaagactggaagtctttcccagccttgaagtaatgttgtgcatactccccaggacatttatttatcttcagatccaggaggtcctaataaaatgcaagaggtagcacaaaacacacaatcacctggccaggcagaaatttacatctgtccagtgggctttttagcggggaaggggaggggtgtgtgtgtgtgtatgtgtgtgcgtgtgtgtgtgtgtgtgtgtgtgtgtgtctgtgcggtggtggtggtgtagtggtgatagggtgttggttgaaaaatatcaaaggagggttctgtgaagttcagggtttcctgagtgaggacccggtgggaaaaaatggctgaaatttccagtgagatggaatgagtgcagtactcaaaaaacaaggaacaaccagccaagggggattgggccctagaggcagaggtgattgatagaattccatgtaataatgtgtcctgaaatgctggaatgtctccttagcccgtgcacagctccaaatcatctgcatgcagccaccccttggcaagtatgtttctttatattcccactccccatctctgcacaaactcctccctcccctgaccaagtcctttcctatccctccaatcaaagagtaaactaagcttagctgttacttacagtgcagtatgaatttttgggatgtatttgtgcttttgaaagtgcttattgtttcaaagcttagtagacaaagcgcagtgccaaacctagttagactgctgatgaaattacagtcactctggggcctgtgaagaggagcaatttctggagcagttgagctttgctaggaggcataatattactctcttgtaggtcaagggcctgtaccaattggaagtcaatgaaaaattcaacctaatacagcataccactaatgggctgctgcactggaggctaggcttaaatttcccttaaaagaagtaaaaaataaattccttatgaaaaagcatggagaacattaatgaaaatgaattctcccttaccatcagagaggtggagccattgtagaaagtgattcaaagagcttccccaatatgagatatgaggcatattcacccataacagccttatccattggcttgtcaattattcaagctttgatgtgtagaaagccctttaatacactaaactcttgtactcttaagcccaaaagcaccccgggcccaacaccctgtccagttgcataggctgcacaggcaagggttaacagtacaactaatgaaaattgggtaggtcagcaaagttgatctcttctccctgggctcaccacaaaggaaaacaccgccatactggagtgggaagactcatcccaaaggtcgcccccacaacctctgaatcttgtggaggagactcaaaataaatacagcctaggagatcaaagaccagaaagccccattggctccaaggaaagtcaagtcaataccctagcagggggaagaattgcttcactcatcctggaacctccaaccccaaggaggtgggggaaggggggcaccccacatgacctgtactgaaatagggaaggaaggggaatgtgtgatgggactaggagtttgagtgagagatatagggaaggaagggaagtaagcagtcacagacgctggcggccaccagaagtttgagcctctttggtagcaggaggctggaagaaaggacagaagtagctctggctgtgatggggatcttactgggcctgctactcctggggcacctaacagtggacacttatggtaaggcagaaaggggggcctggctgccattgctggcttaggcaaaaggctagagggttggtgtttaatgtctactatggaaagcctattcctactgggcaggtgagtcttctcagccaaactctgcaggctctctcagccttgagcaaaacggatggatgtagttgaaggctgctgaagaagccagaaggcaagtttgggcagaaattgaaaaaggatttttctcttggaaaacatctgcattattttctagggcttgtatctcaggggcatcaagaaggttcccaatgacatccgaatctttcctccatctgctgtctctcatctaaaattctacaattggacttaaccactctgcttccaagctttggtctctgttaaaatatacagcccccgaagaaggagtgttttctaagagttggataggactatagaagtaacctataccacccttcattgtcatgaataagtgctcagaaacatccagtagtgattgagatttcactgttcactacctccccagaccatctagtccatccaggagcagctccaactgttagaaagttcttatttgtgttgaactaaatccagttccctctgacttccatccaaaaaccccagctttgcttcttggggctacacagaacatagatgcttccttgccctgtgatagcccttcaaagccctgaggacaagtactatgtctccttgactcttctctcctccaagctgaacagccccagctttttcaactggtcttcataggacttggtttcttacccattcctgggataactcacttccctatagacatggctcaatttgtctgggctatttatgggctggatacaaatcccaaaggaggatggactattccatagtggcattatttccttggagcttgggaagctctatcctcatctacactcctgagaagtgagatggattttcaggaaactcaacctgggtaacagctaagtgagatccaatatagggtaaagggggattttgctgcttccctatcatccctagagaaaaaggctggataggtgttagcttggtgtcacttgttaggtcagaaagaatccagctttccgtagctgactctgattaggttaccctatcctggggctctgtgacccatcacactctggaacctcagagttagaaaagactctgaattaagtcaaccaagagaaaaaataatttgcccccaagccaaagagcattagtggcagagttaatgctcctgaaaaaacatttttctttctataactaccacatttccattctctagcaggttttataatgtatctctctaccttctccaagtctgttggtttgagctagggcttaagcctggggcttgagggagcattttagaaatgttaaatttaaatcctttgtttgtgtgtgtgtatgtgtgtgtgcattcatgtgtgtgtgtgtgtgtgtgtgtgtgagagagagagagagcactcatgtgtcttgttccttccccagcctatgagcttttccagacctggaagcaggccttccatttgtacacaggatcttatactatagacctcaggctcaggttatgctgagctgcaaataataccttccctctccctggacctcattgttcctagcccatctgtacagtgaggaggttgacttgactggtcttaaaggggtttctcagctggacaactctgtgggactgcagcttcactgctaaaaaccctgtagcggccagagtaagctgctagcctcttcctgtggggctaagagatatgtcaagataatcaaaatttaaaaaatttctaatattcacattttatatacattttaaacatttcagaaacattttataaacatctattatataagttaatcctccatccaggaggcattccaggaaagggagagaagccagtcatgtgggggaatgggatagagatatggaaaatgtcaacctctttgtgatgatgggaggaaggggattcagaaagagacctagaatgggtcttataaaggagcacacacctagtaaattcaacctttcttttcttcagtgccattacacaggcatcagacatttgcttttataaggctgggtctcaggaccacattaagctcaatactgtatatatacttatcagcaataagtatatatacttatcagcaataagtatatatacgtatcagtaataagtttatatacttagtaataagtatatatacttatcagtaataagtataatataatataatgttatatattatatataagtaattatcagtaataattatataattattatatattatatataagtaattatcagtaaagtggaagtaataataaaggaagtaatataatataataagtatataaatatataatataatataatatattatgaatatattatattatattattattatataatatatattatatattgtattatataattattatatatattatattattatataattatattatatattatattattatatgatatatattatatattaatattattacataatatatattatatattatattatattattatataatatatattatatattatattatattattatataatatatattatatattatattattatataatatatattatatattatattatattattatataatatatattatatattatattatattattatataatatatattatatattatattatattattatatattatatattatatattatattatattattatataatatatattatatattatattatattattatataatattttatattatattatattattatataatatatattatatgatatattatattattatataatatatattatatgatatattatattacattatatattatattatatgatatattatatgatatattatattatatgatatattatattatatattatataatataatataatatatcatataatatatcatataatataatatatcatataatatattatataataaaatatataatataatatataatataatatattattatatatataatatattatataacatattatatatataataatatataatattatataatatattatattatatataatataatataatatatattatattatattatatattattaatatattataattatataatatatatattatataattataatatattaataatatatcgtattatatatattatattatattatatattatattattaaaatattatctatattataaatatattatattatatttttattatattataatattacttcctttattattacttccactttactgatagtgactcaaagttcagataggtttagtaatttacccaaggtcacacagagagatatgtggtaaggcagaccttgcgcttagatcagtgttattcctactacatcatacagtccttcattaccctcctgctctcattaggggctcctacttgattctaggggaactacaaggaaaggtagaaggtacaagtcagtggtattgtggtttacttcactttggagatcagaaaacatgaggaatagtacaatgtcatttttcttgtgatgtcctgtacctataatccagtctctttatgcaactaatgaagcaggaggaggaagaggagataagaataagaaaaagaagaaggaagaaaaaaggaacggaagcataatggaacaatgagtggaagaaataaaggaggaagaagggagaggaaaaaaaaagtaaaaggggaaaaaacatgccattttgggaagtctagttaccaactctgtcctattcattctgggatggaggagttaagcctgacctacttccagaagtgattttcaaaactgagaaattgagactatctagcaattttcttgataggccagactgagctttgtgagaatttccagcaaattcccagggaggaaaaacacaacccaggcctttcagctcccctaaggtcagaaggaagacctgcatatgcatagacaaaggcattttcaactcacagcagaatgctgctttgttgcccaagaggggaatgtgagaatgcttttcagagaagaggagggacattgggaaagtccagaggaagattaatgggaaatagcctattaaaccaagaggctcagatagttttcatggggtttaagcatggtatgtttgtgcttgcatgtggccaaaaatatgtatgggcatgtgagtccatgataatgaaaagctgtatctgcaatcacatggaggtgtgaactatctatggcacagtgaaacccactacctggtgaaaattcaccaccagctggaacctataattacataacttctatttctattatagcctattaacacttgaccacctaagattagaagggaccttaaagagcaaggctaagacccaaacaaagcctagaacttcccccagacagtttaatccatccatagacagctctgattaatcacaaagttcgttctaaggcaaaccatctgttctgcgatgtgaaaagcagacaagaataacataaaaagaaatagaattaggaaaatagagcaaaccaaaatctgcccctcttgtattcccattcgtaggtctgagttctgctctctgccaaattcgaagcattccagagagtatgtagtggatctagcaacatggacttatgttatttattcttttctactcaagggctttttcttgactaaaatatgctattgatgttctaagggtccctggtgagggcacaggctagaggcttgattttatatctctattaacagaagtcctgatgctggacagtatattctgggagttagaacgcatacactcaacccatccaaaagatgtcatcttccatccgcttgactgaatactgggatttctaggctcaataaaagacttttattcaggaatacctcatatctttgaaaccacctctcttaggagagacatgaatatattgcctaaatatacccaccccacactcctggccccagctaaataaaacaaaaaatcttctaaataagagcttatggatggaaaattctgatgggaggcaatggctgtttcaacatccccacctccttccccacccccacccccatccccaagggtttccttctcaaacacgccaaggagcaatctcccattgcttctatcaccacccctactacagccagcttcaggatttcactcagaaccttttcctctctagaccaaaaatggatgcaatcttttccccctcaagatgaaattttcctatgtatccttgctaagaactaagagaaaccaaaaggaaaataaacaaaagaaatcagaaaaaaagtcaggtttacaaagtgcaggttttgaatttaacaatagctaatgattttgttaaacaggaatgtgtatccagacttcttcctcacacttggttccaccctcagtatttccttttgcctgtcttccagagaacatcttagggttgggaccccactcactgaggatttctaagggaacaagagaagataacagggcagagggccctttcttgctgatctcaaaagcctccacctttctccaggtgcaaatttacacaaaatgaaatagtccagacccaaatgcttagcatttttgcttccacatctcttttggaaaatgtgaaaagaaaattttttcatggatttgcagaatgacagatttgatagaatatctagagcacctaccacccaaactctccacattatagatgaagtaaatgaatcttccacggtaagaaggtgacttacctaggatcaccttcatagcaagacagtaacataaaaaggacttgaaactcacaagatctaaacaatgttaaaggctttcattctgaagactggttctgattgatgagaaggctggcaaagagcaaaagggcacaggtacacaaaagtgtgatagaaagaaagttgagtggcatttctcagaaaccttttgaggtttgtcactgtcaccttagttgccaagtaggtatgccatctacgtttgcttctttcctctgttccgcctcttcaggccgtcccatcctggaagtgccagagagtgtaacaggaccttggaaaggggatgtgaatcttccctgcacctatgaccccctgcaaggctacacccaagtcttggtgaagtggctggtacaacgtggctcagaccctgtcaccatctttctacgtgactcttctggagaccatatccagcaggcaaagtaccagggccgcctgcatgtgagccacaaggttccaggagatgtatccctccaattgagcaccctggagatggatgaccggagccactacacgtgtgaagtcacctggcagactcctgatggcaaccaagtcgtgagagataagattactgagctccgtgtccagaaacgtgagtcactatgggggtaggaaagcactgataatcaatgaatcaatagtggatgtaattctagaaaagcctgaaaaatccagaggccttcgtttatacagaggctctccacaggtatatgtgcttatcagaggaagtggacaggcagaggattcttagggtcagcattcccatagttaaatttaggaagtgctgggaagggttcctgacctgcaaatctctatcccttcgagtgtcccagaaatgccagtatccatggactagttaccctccttgggctctgggctttacaactcaaaaatgagtacatttaatttgtagatagatgctgatagagaagctctggggaaagggaggcagaggttagccaggataagtttgcttgctggacaattttacaaaagtctggccctgataatccacaactgcaggtaatcaaaagctctacttgagccccagaacaaactacattaattttaaaggtcagttgatttttacttccaagtattccaaaaccccgggtaataccaaaaagtacctaccttcaaaggaagccattttatttgtattgccctttccttcttatttcctccaaagtcagaagccccctttagttccagttgcagatatatgcatgcccttacgcccaacaagaatgattcagccttttggtcccatatccttatgactgcccagagtttcctgtcttgtcttttctttgcagtctctgtctccaagcccacagtgacaactggcagcggttatggcttcacggtgccccagggaatgaggattagccttcaatgccaggctcggggttctcctcccatcagttatatttggtataagcaacagactaataaccaggaacccatcaaagtagcaaccctaagtaccttactcttcaagcctgcggtgatagccgactcaggctcctatttctgcactgccaagggccaggttggctctgagcagcacagcgacattgtgaagtttgtggtcaaaggtgagcggccctctttcctggtgagcatcttaacacacaagcttgaaacaaagatacctcaaaaggtgcccttatgcaaaagaagaattgggagaggaggatcccaagcaggcaatggttgtacaatcacaaagaaaaaaaacttggactggggacaacagggatagagacattgcctatcatgccataggttaagtagataaagacggtaaaggaaagagagatttactagcacattgtatttgccagatacaaagtacaataacttgacacacattttctcattgaatccccacaactgtcccatgagatagttatcattactcttactttacagaagaggaaacagagtcagaaaggggaatctacttgcccatggtctcacagcaaggaagtataaatctggatttgtactcagatttcatgctcttcctactatgtctgattgtttctcatggttgaatctatatcagatcctgggcaccctttgaaagctgttgttttttgtttgtgtgttctgtttgtttggttattgttttgcttgtttgattaggcttgatctaatatatctacatgctttcttttaacttccctcccccacttcattgtaaacccaaatacaagttctggttgaagtatcctttaagatgggctcttgttaatcaagatctgactatttcttacagcactgtcctgggagcactacaaactatgcatataaagactgtaagctgaggcttaaatgaagagtccagcagtgatatgtccagatgagttttcttagctttcaagagatctccttggaaagaaagacaccccaacaaggttaccattgcccaaaacatgttggaaactaactgattttagggaattgccctcagaaccatctgaaaattattgtcttctgaggatagttctgtgtaaggagagggcgtaaacctagcccaaatggcttattaccatttgggctaggagactgatgttggtttgagactcttgtgtttgcctggaggaatttgtttcccaaagttaagctgtagtgaggatgtgtgtgctgtagatcatggtttgttagttttgggaggaacaagagtggtccgccctgaaagttatatgaacagtgtcccagttctctaagagctgacagtctggtcaagcagagagggcagggcgtgaccagaaagcccaagaatgtatacttcataaagagactaattgaacattcttgcctttctgtgagttacttctcagaccacctaggcaagaacttgctcacagtaaaccctcctgtttattccttctcacagtcaatgcttattacagtgctgttaagcagtgctcgccattgccccctactgacagataggaaaactgaggctcagggaagttattctcagccttccactcttccctgctctgtgagccaacgtaatctttcctggctacctctacctgcctccctgtccacccaaccttgtcccctgagtctgaccccctatttcacctctgccctacggaactctcagccctttcacccttccacctcactctgcactgttctttagttctagaatgactctggaggccctgcttttgctcatgttcttggactgctgagctttgctgacgaacaaaacaaaacacagatatgaattgactccacttgaattttatgctctgcgatatgtactgcctgaccccatgccgtgtgtctatttgcttatctttgtctcattcctcatagcagcttttcagcacatttctaccttatttcaggcccccagccttgctcctaaaagataaggtaacttccttcctctgtaagaaggtccagaccctcttcatatgtgaattttatcaactaccctcctctctgccttgatatttccctatccatttcctcttggctcagagtaaggtatgctttgctcctctccacaacaagcccctcctcctgaactcttaacatcagctactccaatgccctgcaataccctttatcctctacctaagccaaatagatatgcatgtataatatatgtatatatgtcagtatgcaagcctaatacatacatatatatatgttatttttcaaaaatctttctctccatctgccacctcatctctcctatgttcactaccaaccttctcacgaaggtagcttccaccagctgaacctctcaattcattcaccacaacataactttgtaatttggggtcatcattaacctccatatcaccaaatcccaagacctctccattcatacttttcctcctcaacatctgtgtagcagtggatcctgttggccatttcttccacctcaatattcttttaatcactgctattgatgacaccaacttatcttggttcttctaagaccttcctgaatgatccttctgagacacctttgttggctcttttttcattcactccttaattgtaaatgttctcaaagactcaattcttattcatctctgcatgtatttctatattatcaggagattttatttacttctgtggcttcaaatatcacctgtagtctgatgactctccaaccataatattatctgtatttattttttcctgactgctagatcccagtgtctagttaccttctggacagcttcatttctaatttcagcgtgttcaaaactgatcgtaccttttactcaccaaacctgttcctcaaacctgttagaaaacatagcagtacctttgactcctccttctcttttacctcgcatcgtcaaataatcatcaatattaccaagtgctgtgaattcacctactgaatcagataccttattaggctctttctttctcttcctataccctcatggtctcatattcttttttaaaaaacaatttcaatcatcttctaaatgttctccccatgttcatacattcttacgaagtcatcaacttattcaatatttattgagtatatattttatgtcactagattataaaattcaagagtgcagaattctacctgtctacttcattgctgtttttcagagcccagcaaagtatctggcacaaagaagacactagacactagatgaatactgtatttgttaatgaatggggaaaatatgctattgccttacctttgaaaatcctaccacactgttgtcagaattatttccaaaaaaaatagactgaacaatttttgcttcctttctcaaaaggaagtaaacctttctcaaaaggtgtaaccttctgttacaccccatggatctttccaactaaagaacaaagcccaaacccttttagtctgttttcagcctacctatccagacttatctactaatatgtttcgccacatctaaaacggagcatgctgtttcctctgctagcaagagggagaagcttatggttttctcatgtcttttctgagcaggtacatggccctgtgcttgtgtgtggcctcctagtttcccagaactgtgtcagaactcttcaaaatccctatggaaatcttattcctcaaccatttttaaggctattttggttagttttttttgttttctcgcctattatccattgcctcaggcagctgtgtgacaaatgctaccccatccctggggagaggctcttagcactgggtgaccaataaaacaagtcttttgagtcaggtctttcagggaaccaccagacaggccaaataatggcaattattcaaaaatgaagtttgttgggctcactccagcacctggaatggggttgtatgttcaagattacctctgaggtagaaggggtaaggggactaggagaagttaaaacagcacaaagcttgctgttcttaccaaaactgggatatttttcttccataaatcctgtctaaggtgctgcaaacctttggctattttgcaaaattctaaaaaaaaaaaaaaaaaaaaaaaaaagttgattacgtcaaattttgcattatttcactgatgttgttaaagggtaaatttctggaggttattatgtcaccattttcactgatgtcacccattgccactttctttatgatacttcccaagtttctctcaagagaattaattactaggtctcagttagaagttagtaaaaataaaatatattttcccatccaagttgactgactctctgaactctagctacaggttccttcgagatctattaatcctgggttaaaaactctgtccttgattgatgtatgaaagatgaacaagcaacacaggacttaccagcatcatgacagaagtgttgaggcaggtccaagtatggacctgaatggcctttacttacttcctatttccctagggcattaaactattcaccaaagggtaccaggtcccttcaatcggttcccttttccttgcagactcctcaaagctactcaagaccaagactgaggcacctacaaccatgacataccccttgaaaggtgagttttgctagagtctgaggaagtagtagaggttcaaaatggtgtcatcgtagccaagaaaggaatcacaatgccatggaatggctaataaacagtcacttggttcctcagagagaacatagcagtaaaggaatggaaacaaaagaaaggtaacaatgatgaatatatactctttttttgtgaaaacttctgaggcaaaaggaaagagagggttagaattactcccattggaaatacaaaaaacaagaacactaaattctattctgctcctagtttgacttgctgtgtgactttgggtacattacctcccctcgatgggaattcttctcactgcccacacctaacagtaagaaatgaagatgccttatctcatggtactagtggttgataacatggtcaggtaccctggaaagtacagcacaaatggccagggaaggactccaacctttgcaaccatctcctatctctcaactttttgaaagaagagagacatctctgaccctattctctatattcatagcaacatctacagtgaagcagtcctgggactggaccactgacatggatggctaccttggagagaccagtgctgggccaggtaggaatattgtcaggatttctatcttttcttcttgactctaagctttgtgaccaaaactttcccttatgcacactgttctacagcattgaaatctgcaaatcattacctgctatgtgccaagcaatggtcaagggcactgaggatgggtaaagtgggtaggatgtagagagagagatacagatccagagatgagcaaagtcagagtgaggttaaggggagtgataaatgtgccctttatttagttctctgttgtcatagtaatatgctttccaaacattctgagcaagaatatggatagggacattatgacatcatgacctcaaccaggtaaggataatggctgagtgtcattgcttgagctcttaaccagggctcttcaagccgcttgaagctgatttctgattcctccaaagccttgaaaattcccaagtcagggtctcagagattcaaatcccaaataaatcttttgtgtttcacctgcatctgatagtcagttggtatgccttcacatgactacattgactgttgaaataatagaacactctcacaccaattgataattagctgctccccttaacccctgagccctccattattacctggggctgccttgtcccattcctcagaactctctagaccacccccatggtcatgcaacaaaaggtataccaaggaatctctaagactccaagtctacagtaggcatctgttgtgactggttggaattaaatagtttgataactatcactcctggtactcattctctgcctgtgtataattgagagagtggacttccaaatgctctttgtaactctccattcctgattgcagagttttttggctatcccttggcagcactcaaacctgttttatgttccacatttgcattgccatctttggcttcaagatttccatagctccgttcctctccgagaagaacatctactgggagaagagaagttagaaattgcctcatagggagttggtttggaaaaatgagaaaataaccttgggcaaagttattagatgttgggtctgcgccctattttctctaccaagttttttagtacttgactctcttcaaaagagaatatttcttcgatttgtaccagcttataacttgagctctctcagtcccaacaagacactctgaggaccacaaatactggattcctaggacacgatatcttagagtctcatgaaaacaagccagttgcagcaacaaatcctaagtacactgaggttcctttcctcacgcctctctatcccccctgacctagcatcttagattcagaatattatagctaaaagtgctttagacatcatccaatcttttcattgaacttatggggtaactaaggcctagtgacagtcaaagttttgtctaaggtcactgtattcatttttccatggctgctgtaaaaacttaccccaaacctagtatcttaaaacagcataaatatattatcttccacttctggaaataagtctgacacaattatcactgagctaaaatcaaaatgtcagtcagcaaggctatgttccctttggagggtttggagaagaattaatttccttgtctttcttttctggcttctagaagctacccacgttctttggctcatggcccccttcctccattttcaaaactaacaatgtagcattctcaaatctctgttcctttttactatgtaaactaacatactgacaggttccaggaatttggatgtgaatatctttagaggaccattattctgcctaccatagtcatacagaaagtaaataacagatctaggactggaagccaagtccagttgattctttcagcttttaggcataatgggaatatgtgtctcaagtggctcagtggaaatatgttttgagaaagaaggaagctggggacttgaccagagcgtgtgatgggaagaatctttgtggctagaagtaactgaccagaatcttaataaggtatgtagcatttttggtgaagctggaaagtcaggatattattttcttttttctaagggaaggtgaaaaccttctgtcttggccctatagaaagcatagacaactagctcaaatgcccaggccaatcagcccaccagtgagtctggaagaacctgtttacacatggcatctctttctcaagtctttctcatgggactggagttttttctctctggctagctaagaaggttaggagaatatggaaaatgaaaaagaaaaaggcctggcttagtctaggctgtttcttagagtttttgtttctggccttattttcaatcaaataccacttgatcttgttttaccctctaggaaagagcctgcctgtctttgccatcatcctcatcatctccttgtgctgtatggtggtttttaccatggcctatatcatgctctgtcggaagacatcccaacaaggttagtgatgaatatgagaaggtggctttggctcatttgttctttctgtcagtatacttgagcctaaattctgtatcaggcattgtgttaggcacttcaagaagctcccagcctagtttgggagttaaggttggggtgcagggaggcagatgttcgagcaaacaatggcataagacttacagaactaaatgcactaggctttggtactcagtgaagtacagccatctttctaacgagtcatcttgtaatgatgcaagagaaggagaagtcacaatccctggcctcaagttgctcacaatttatttaggagattcaaggtagaaacatggaatttatcaatgacaatacatagcaatagaggctatgagctcaaaaactagagaagacaattaatgctaaagggatccagaggagaagagagtaatttaaggcttgggtaattagcaagggatttcagaaggaagaatatcttagaccacattttggaggatgaaaacaagttgtaaggagacagtatttcaggaagagagaactacatcagcatagttgttagggcctaaaagacaactgagagtggggtcatcaataaagaaaatttctgtagatgggcaacagggaagtacagtgggaaatgaaagcttattcctgattatagaaggccttaaatgccaggttaaataatttggactttcttcactaggccttgcaagggcactaaatttaccaaatttttcaagcatggaagtggcataatgacagcacagttgtcagagccatttaaaaactatgaaccaaccgaggaggaaaaaaattgggatgcttgtttctaaaagaaaaaaatactagctgtctctcaatgcccagtgcactagtcatgttgcctagcatcaatttgtcttattctctgtagtatctcttactcccaaatagcctggttactaccatggatctgatggatttccatcaccagaagggagccttgagtatctccttctcccaggtttcaattataagctctggcttttgccagttagcatgtttatcaccatgaggctgaacttgatagcacatgactacaaaccccaggggcactaaaatgaaagcatttgcatatagccttgatgaggctgggcataagcggtaaccacattaaattgtttctctctcaaaaaccttccatggcttcttatggcccaggggataaaggtcaaaatgtagcattctattcaaggctctctgtgatgtgggtctagccaattttctcaacccaccacttccttatacctagtctcatttccaaaaattcctctttcctatctctgtataagggagacagcctcagagcatcaatttaatttaacataattactgagcacctattgtgtgacaggtgctgagcatattaagatgaaaaagacacgacccttgcggtacaggtgctcataggccaatgggcgagtaagacacagaaatgcagggctctaccataaggcagaagtcctgtggcttcccttgtttactttgttgtcatttaatgcttgcatttccagttgcatccctgaaaaattataagcacctagagggcagtacaaagaaatatctgtctttgcaccaacctaagcctttgagcctgtacggaatataggacactcctcctccacagacactagggggcaatggtaaccaataccatggtttttcctgggtatatagtgggggtgagtgcatttgggaatgtcttgggtcacggccatcagcatcaggctaatccagtcccttcttcctggtatgtggcctgacagtcaagtttcccacaaggactctctggggatccttgggggagattcctgggtaaagagcaagtccagttctagtgccctcccccaacccataccgagaaactgctccagcccaatatcctgagtccaagatgacaaaaaggatagtgaccaaatgtgcttccccttcttttacctgataaatttgcatctctgtgtttcaattcacctccccaatacctcccagttgttggaaagctaagacatattaaaatcccctcctctgtacccttccctcatcttttgactggtacccaggatccatgattgacctttgtccacttgccatgaaaacttctgacatgattcctcctttttttctagagcatgtctacgaagcagccaggtaagaaagtctctcctcttccatttttgaccccgtccctgccctcaattttgattactggcaggaaatgtggaggaaggggggtgtggcacagacccaatcctaaggccggaggccttcagggtcaggacatagctgccttccctctctcaggcaccttctgaggttgttttggccctctgaacacaaaggataatttagatccatctgccttctgcttccagaatccctgggtggtaggatcctgataattaattggcaagaattgaggcagaagggtgggaaaccaggaccacagccccaagtcccttcttatgggtggtgggctcttgggccatagggcacatgccagagaggccaacgactctggagaaaccatgagggtggccatcttcgcaagtggctgctccagtgatgagccaacttcccagaatctgggcaacaactactctgatgagccctgcataggacaggagtaccagatcatcgcccagatcaatggcaactacgcccgcctgctggacacagttcctctggattatgagtttctggccactgagggcaaaagtgtctgttaaaaatgccccattaggccaggatctgctgacataattgcctagtcagtccttgccttctgcatggccttcttccctgctacctctcttcctggatagcccaaagtgtccgcctaccaacactggagccgctgggagtcactggctttgccctggaatttgccagatgcatctcaagtaagccagctgctggatttggctctgggcccttctagtatctctgccgggggcttctggtactcctctctaaataccagagggaagatgcccatagcactaggacttggtcatcatgcctacagacactattcaactttggcatcttgccaccagaagacccgagggaggctcagctctgccagctcagaggaccagctatatccaggatcatttctctttcttcagggccagacagcttttaattgaaattgttatttcacaggccagggttcagttctgctcctccactataagtctaatgttctgactctctcctggtgctcaataaatatctaatcataacagcaacttcagttgtgttggtcttctctcacagtatggtaggacctactaaaagtaattaaagtgagactagttaagatggctggggcccgagaatatggatgtcacttttgcttttttggtctttccccttcccacacatgccactcctacttcactccactggtaagcccagctggagaacagtgaatacttgattaaacagtactcccctggcttccattacccaacctgtcatcctgccaggtccacctggatgattcttcccacatcaactggaagcctaagaaagaaaaagtctttctgtctcaggggactatgaatgcagagatgaagggatttccttctttcccaagtatggatgcaccactcccaaggatttccacttctttgaatcttaaaatcctgggggtagttgcatttttcatatgttatcttctttagctcctggccccttcttacaatgtgaggtggggataagagcaagaaagcctttctcttcaaggaggaatagggctaggagtgtgtgtgtgtgtgtgtgtgtgtgtgtgcgcacgacagagagagagagagagagtttgtatgtgtacataagttcctacacctttaaatcaggctccgctgtgaggacctgttctgacccaggttgacacagttttattttctcgatgtaattaatgtcaaatcaacttctgcactcttcaaggaagctgccatgttgctatttctggttcccatgcagcccctaggtcagctcatgtttcacaaggagctgctccccttttgcaatgattacagaagtcaaaatagtacacgaaagtaacaaaaaggagtcctccacttcaccgccacccaacatgccaaatccagggtaaaaacctcaacattttcctcattccagacgctagcttctcctagttggcgaaaggaacaactctttcttccccatcgtgcttacaagcctctgaaatagggcctccacccagtggaaaccccaacttccttcatgaaacaactctgcgtccagaccctacagcctttgaaaatacccattatctttccctactacccatagaaaaagtgagttttaggtgttgggaagagaatcctggttgcattttcactggtaaaaggagccacacatccagggacgctgctccataagagctaaggactcccagggatatctcaaagtcattaatcttaaagagcctagagatcactgattctaatacttccgtattggagatgagaaaatgaagctcagagaggaacaaaaacacagttagtggtagaaaggagaccaaaagtcaggcctgtgaactcctcagtgcatatatttattgcagcatctggatcttctttgcctcaaaacttagaatatttttaaatacaggacaagctagtaaagaattcctatgtaataaagatagtccacagctgcagaggctaaacaaaaatgagatgataacatgtgacctttcttaggcagatggctggttggggaaagtagatgaatgaaaagaggaaaagatctccagaagagcgggaaggtataaagtttctctaggacagtttcccaaatcgtgcttcattggacattgacacaggagaaggctgtgggggaaaagaaaattcatgatcagataggtatggcaaatgcctcattctatggtttcctctttgagattctcaatgcaacattagactattaaaggctctgaaaaatcctacaagaaaacacctgtataaccttgtgtgaccaagtaataccaaaatttatttgccctctgagtctgctattttgccctcttcctccagcccttgacactgtttctcaggaagaaaacatccttcatgctggctactacctcatatgctctataacattgtggtgttcacagtttgaatttttcaaaatccagggtagaatttggcccccaaacctaaagctagtggacaagaggaaagtcaatcaatcagtaaatatttattattttctgtaactaaagtactgggctgtggtaggggagacaacaatcaaagacatagccttgtcttccagaagctcacaatctagttgggaattcaagaataccccttagaaaagttcattgacaatttacgaggtgctattagacagtaggagagaaaggcatacataccagggcccagggaagaagagctttgtgaatgaagaaggaaaaagtgtaagttgactttcaaaagtctctggaaacactggactttagctggtccaggaaatatagggaagaattggataggcaggaataaatggagaaagtgttcctacaggaaaagacatgtggaaaaggggagaggtaggcaagatcaaggagtgtttagaaggcaagactgagtatcaagaaagtgaatttctaagccctgcttactcagataagccattaggcttgtgtgagaatgctgatgtcctagataggagactctgggaggggaatatgaaggaagaaaataataatgaatcaaagagcacttccattcctggacactttatacattttcaagactattgcgcccccatcagcactctcatggtgtgtgtagacacagcccagggctgtatttccctgagatgccacacttttcccctggtgtcctcagatataatgcctcagttcctgcaaagtcacataaaataacttgtgagaacttggtgcttggtgagcatccttgtatccagctggcagtccattcgtcatatcccatctgccctggcctagagctggtaagcatgtgccgcacttggggtatttgacaaactgacactctaccacatggagtgtccaactcagcttgtcaaatacacggagcgtggcactgcaggaggccaggccaagagcttctgtggggaagtgagatcttcctgggagatgtgaccctagagggaaagagagagaaaggaatgatgaagtcacacccttagccccggggatcttgctcaaaggaccaaccaaagcaccagaatagggaagtgagcaaaataggcatagggttcctaaccagaagagagatcctgaagataagcaggtaaagcccgagtgacacccagtgctcagctggaagctcatcaggcctgagtcctgtagctatggcatttctaggggtcccaagcttcagtgggttcctctatgcagcagagaggggaaaatttggtcatcatcctgcctccctgacttgaggaaagtaccagaccctagagtcagcatccttgctccctcttctcaattctcccaagctgtgttttcagtgttgtggttatgcacataggctttgaggttaaacatgagcttaaatcctagttcttccattagctagttaggcaaccttggatacatcatttcacctctctgagctcaagttttctacacccacaaaatgtatgtaagtataatacctacctcataaggttattgtgagaatgacaggagataatgcatgtaaagcctttggttcagtattcaatacataacaaatgctcaaaaagtagtggttgtgtgaccaaaatgaaagaaagagctattggcaattgatttagcaggatctggacaggtgtgacattgatttcttgtggtctcagccttgcctaacatgatcctcttgtcccatagggactcaagaatggcagctattaaagtgcccttaaagatcatctagtctcactcacttaggttataaatgagataacaaaggctcctgttggggaggagacttgtaaagtttatacaataaattttttacagttcagcagtatgccttatacagctttcctcattggttattttgcctcccttctctgtatatccctctgggaaagggaagacacatcaacaaagagggcaaaaacaggcaatagctttgtaatgcaacatttgggatcactgaacccacaagccaccagggcaataaggaagctgccaggagcagggtcaggtctgaaacttctgggagaattcccttggcaacaatcagatcctgttgctaaaaatcccaggttgctggtgtcaaattactgcccttaccagctgtggcagttgatctgtgagcaggtagctggtctacattaaatattgtcatgaaaagtggcaaacatcacaaggttaccagaaatggtaaactgcccccatgaggccggaaagccctgtcccagcccaggtaagacagagggattcagccttgtctttcagcaagaaaacaatcagtgtcttttcttgctctattcttttaattgaatgttaagaaggtaacatactccttcaatttaagttctggcagtcatctcaaaactaaagctctttcactccctcacttccttttctacctacccaattcagcctaatccacccagcagcaaaagcagcagtcatggtcaccaaatatggcatgacagaatcgacaaacttgtgttctaatgctgtcttggccatcaactagccaatcatggcttgggcaagtctttctttgggtttcagttgtcttctctggaaatgagaacaaggagacttacctacttacctggcaaagttgttggaaagtgttgctaagctttccagagcctcccacataggagctcaaaaggaccttgtctcagcccctggacctatggttggaggccagccaagcaagctgattaacagagtctgagttggggatggcaggagaaaaagaaatggattgttaccttttttgtatcattacactcattggctgtcagctccagtaagaagacctagataagctggaggtgttcacagccttttgaatgcactttctgactttattcacctccagaaaggctggaaaggaggcatgaaaggggctaaaaattattagtactttgaaatttgtggagccttatagacaacattgcttcagtattaatggaaggagttagtggttgagctgaaactagactggtatgcctctccaatggagtgtatgtaagaaaatcacattcagttgagaaatgttcaccagacccatagaaagaagacataaatatctatatgggatgatattaagggaatttgaaagctcttctcttggtctgttatattacttagaataacatcatttttccccatatgaaatgcaaaatcctctactgaagagcgtcatcaagccactattgttgatgcaaaggatgggtcagtttttatggagggaattggagggaatagaccagaagaattaggggtaagtaggtgtctaggaatctctgaacactcagagtgagccaagtacctgaaagaaaaatagaagaaaagaagaagtcctcaggaccatgcctaaaaatcccagactgcctctagtatgagcaggacctgtcctgggtcagttacaggacaggtcctgctgcttgatgtctcagtcctcctaggatagagcaaaaagaggactgacctgggagcccagacccagctgtgctacagattctctgtatgactttgggcaagtccctttcttcctctttctggacctcagtttcttccatatgtacctagtctctaagagtctttcaattttgaatctctaggagtcaaagattggactagaaaagaggctttcatctttgagtcatgcctctcagagagtgctatatggattaccaccagcactctcctcttgaatgtgttcagccccacccacagttacatatgcaaagattactctcatcttctttcttgacagagggctgacaatcatgaaaattaggaatctaataaccatgggtctctagacagcatctatctaatcattcttttcctctttttacttttttattttgcaaaaggggtgaaaaaactgtgtcctagattggagaaaggacttacccaaagatacacattgggtaaatggtaaaaccaggactgctactcaggtttcctgactcctgggtccaaaggccattccacttccatgtgactatctcctaaacatcctgattggatagaaaatatcctatccccttttcccctccattagaacctctaggataaaaggccaatggaagccttcttcctcccacctttgaccttaatccctgaggagggtctgaagagaatgggatgggcagatccaagccacccttggctgccatggactctgccccagcttgagaatccaagaagagagggcaaatggataccatacctgtcagtggagtggtgccttggtcatggaggggactctgattccccagtgctgagccaacctgcaggggccagatggaattgggctttctgccgtgagcaagaagcttctgtgttttgaagggcccttggtgtcttcaacaggaaacagaaatgaggaagataagactgaggttagccaacggaaatctggatgcaaaatgacaaaacaatgctgttgtgaaagggtctgctactgcagcaatagtagcaggccactgccctgcctccaccaactcccagctgaccttcaacagacactaactttccaagctgcagagagagagagagtagaaagcacctggctgccctaggctctgcctgtgggtcaaggaggttttcccagaataattgagggaaacctggaataccagaactgagacattatctaatgaaaaaacccgtagtcaaaattgagaaacagagcctctgagggataaaaggaaatactcagtatcacaaagcaaattagtggaaagctgaaatttaaacccatccccatggactccaaatcacatgttctttcactctgccagaatgcctcctggtcctggaataccattttacttccaacttctctcctggcatacagaaccagctacataatttgcaaggcccagtaaaaaatgaaaacgataggccctttatttaaaaattaagaatatcaagatgatgacagcagaacattaaactaagtgtggggtccttctaagcatggagccctgtgaagctgtacaagtcatatgcctatgaagctggctctggggcacagttatgaccacaagccacattctgtcatcttggggcttgctgaaggaaataaataaggaaattcacatttattggagtacttatgatattctttcatgtgtattatctaatttattcaacaactctctggtatggtattattattcttatttataggtgaggaaactgaggcacacagaaataaagtgacctgtctaaggaaacaaaactagaaaataatagagaaggcagatttttcactcaggtctaactccaaatgttgaggttttcgtctactttcccacattggctacaaggaagggagaagaaagtagttgactttgagaaagaaaaattagtgccagacccctaagttcaactgtgaccttcaggctaatgagggacatgaaaggtgtgaaaagaaggtggatggtttcttaatgcctcatgtttgcagtctcctggaagtccccactaacagccaggaagatgatgaattcccatcatgcagtgccctccaccatgaattctgatggcatgaaggatgggaggggcaatgctttcaggttatactttgatagctttcaatgactgcagtgcccaagtcacagtcctctgtctacactagtggaagtatggccctgagtgatagtcaagccgtggtaaataatcttttcaagctatgtacattcttatatactcaggctcaaaagaaagaccacattctgcgagccaagagccctgggccctagtccccactctactacctccctgggcattagtttctcctttaatcaacagaggttggactaaatggtcttggagaccactccaactcaaacattccctggttcctttgtggctcttcgttactcactgtgggcttccccatggttgcaggacctgaggctctgtgaaagcctgaaatagggattcacttgcactaacatcactctgtagaaaacttccttctaccagaataatttattggctcaggcctcaagaccccagatctagcttctagaaagattcagttcttgtttcttttggtttctgactaaagcttggagcggaagtagggtagtcctgcgggcactttgctaaaatgggacccccttcttcctacgcataccatagagattaagtttagctacacacgtttttttcttccctatcaattagggtactctactggccttttaacaggggtttctggagacaatgtgtttacctaaagtagtaattaatggtatctattttgagtccaaagacagggcaataaaagagagcattaggaaacagaaggctctgaaaatcatactacctatgcatatggcctgaatgcgagaaaagggaactgtgctcagagttcctctttagcccacaaacacaaagtatgctgggaagggccaagtttccaataacagcacaaaggggcttcttctttttgatctgttgtccaggcttctgcagagagcaaccaaaagtcacaaagttttcccattttgtatgatttctgccttgcctgtgcttgtgaagggagatgagaaagaagggaaaatagttgacaagcggagcaagcaggcagtgctggggtcccacactgcagacacactcatttgtttccgcagtactggaatggaaagaacactgaatcagagtccctgcatcttagaccctgggttatagaccaagctctgtaacttattgattatgtgaccttgaacaatcacacacagcctgtctgagccttagtcctcacatcagattgaaggattctcaggctaaagggaaatggaagacaggtgtgcaccccaagagctatgtcaccctacagaatatgataagtaatttgacaaagtcatgaagtgccgtcagatacgtatataagattctcccagggcagaagatgagaaggtgatggtaactggaaaggttctcagaagaataagattttggctacatcttaagggatagagaggaaaaaaatgatgctcactgtctctggaaagccttctctgacaaccacctgcaaaattagttgcttcccaccttgccctcctctactcttgaaaaacatccacacagcacttaggtgtcagtctctcccagaagaccaagcactgcccaaagtaggaactatgtttgatctttactgtcttcttaggcctaggaataaactagttatcccagaactgtgaggtgaataagtgaatgagtcaatgcataagcaaaagaaagagacctcatagcccaatgtccccacattgcttagcttacccaacctccatgaaggagctgagaagcccccacccttcactttgagtttatcttcctgttcactcacccccacctcctttcagaagactttcaagaagaggccccagggaaaattgcaaagctaaggccacttcctgtgcaagtggcttgtgtccacacactctacctcaaccctagtgattgctatgcataggattgcattggggtttcctctgaaaggaaatacaaaggctgatgcaatgtgtagggcacccgcaggccaggactaaagaactttttgtacacctgggcctagggacagaggtttcactgtgaggctgccacaaaacagtgacactgacaagataaatggcagcaattaacccaataactacagcttaagtatattcagcaagggtgtgttgagcacctactggctacaaagctctatgcttggcaaaaggggaaaaaataaacatacaacagaacagaaatatacaacaatctaatacaaatgtaatgcgagccacaattattataataaccacatgaaaaatttttaagtgaaactaattttaataatatattttgtttagctcaatacatccacaatgttatttcaacctgtaaacaatgtaagtatttgttaataagatattttacattattcaaaatgtagtatgtattttatgcaaacagtacatctcaatttgaacttgccatatttctagtgttaaattgccatctgtggctagtggctactgtattgaccagaacaggtataagacatggtccctaccctctaggaattcacaatctagtccagaaaacagagtgctacataagcatgttcaaaaaatgagtacaatagtggaggtgcatgtatggaaaagagaactgtactgagggtcaggagatctgggctacagtcttttctctgccactaattctctgtgtgaccttgagcaaatccctctccctttctgggcctccaaatttccatctctacaataagtctgattaaatttattcacaaaacaaatacaagttgaatgtgttctaagtgtcaggcatggtgcaaggtactcaagatgcagaagtgaaaaagacatataaaacgcttgccttcttgacatataccgtgtggtggaaaatagccattaaacaaattttttaaatatgtcaagaaagggggaagatcagagagcagggagaacacgtaacaggataacataatccaccagacttggataggtcaagaaaacttctctaaggaagtaacttttaaagtgagacggaaaaatgaaaagtagtgagccaagtggataatgggtgcaaggcaattccaagcagaagaagcaacatgtataaaggttctgagatggagaataatgtggcatattccaagaagataaaaggctggtatggcttgaaaaagagtgagcaaaggaaaaaatagcacaaagcaaatagaagagttaagccgggggccaaactaagaaaggacttgtatgctatgttgggcgtttgagacatgagaagccagaaagtgtatatatgtgatgcagtgcccttctatattcaagcctaggattttaggggtccagactatggcaacaaacaggaaaaaaaagttaatttcaactggttggattagagacttcacagaagaggccgaattttaaaagagccttgaaggataacaggatcaataatcagagaaaggcatttcaggcagaggaaagaacccaagtaaaggtgcagagataggaaagaatatggtgagcttgtgtgaatagggagactaccgatacaaaatggcaaatataagcctgagagcatttttaagtatctatagatatcgtagaataatagtagcccaaaggcctatccaacacaccaaatgtgctctggaggaaacctggcaaagaggttcgacctatcaggagatccattttgtactggaataacaataattaacaagtattgtgagcttactaagtgccaggcactgtttgaagccctttacatatgttagtttatgtaatcctaacaacaaccttatgagggagatactataattacctattaaatggcagatgtaggatataaatatcatgcaacaatttatgaaaggtagaaattttggagcaatctacaaaaaaatatacaatatgtctctggctggaaaatgtcaaattcaagtcagttatcatctcagtctttaagggcagttttttccaagaaaacctcattaatttccaatttatgattgttagataagtctgagctgaagcttttgtttagcttcttagaaagacaaaataaatgaagtaaataaaataggagttccagggagttgtttaaagacagaaaaccaaactggttctacttactacccatacctcactcccacttagagtccttcagaaccttccatctatggcagaaataactgaagtgaccctaatcaaccattttaatctatttcctataatggcccacctaaaggtttttactaagcagtagctgtttttgttttgtttgtttgtttttttcttaaaatgagtaaagagtttatctgggccaagcttgagagctgcaactcaggagcatagattcgagttgccctaaatatacactcccttgggaaaaattttaaatggacaatgaagaaatgaatgaggaatcaactttcaatagcctattgtaaatagtatatttggaaggaacaaacatgtatttatttaaaatatatattctcactctagtctgtctctcactcccactattcacatcacacctgtagtcccagctactggggaggctgaagcaggaggatcacttgagcccaggagttcaaggctgtagtgcactatggtcacctgtgaatagccactgcactccagcctaggcaacagaggaaaaccttgtctcaaaaaataaataaataagaggaaattctgtcattttcaacaacataaatggaattggagattacgtgaagtgaaataagccaggcacaggaagacaaatgccacataatctcacttacaggtggattctaagataatgaaagttatagaagcggagagtagaatgacggttacagaggcttgggggtgggtggaatggggagataattttcaaagggtacaaagtttcagacagaaggaatagggtttttttgagatctattgcacagcatggtgaatacagttaataatagtatattgcatgtttcagaattgctaagagagtacatttcaaattattcaacaaattataagtatttgagacaatggatatattaaatttaattactccacattgtattcataaatcataacatcactttgtatcccacaaatacaattataaatttacaataaaaaattaaatgaatatatctatatatctgtatgtatctatatatcagtatagagatatttcctaattcagactggggtagttgcccgtgatatcattgacttggcacacacagactattttcatcttcttagtttgtcttctgagtaaaggaagggcaagaattgtgccttttgggaaacaaaaagaaaatttagaacagacccttgagctttcaccacagctaaacatttgctagaactagatttggcactgattcaggaatcagtcaatccctaaaaaattgatacctcatggggttacaaagtggaatcctgagagctcctgtaaaggccagataatgcaaggtaagaagcagaaaagcttcatattggcatcagaagggacactgccttctattatcggttctaggcagaataggaagtgggaattggaagaaaaacacttttgttgagtacttattatgtaccacctactctcactctctattacatcacttattactctcaataaccttataaaataggaagtgggaattggaagaaaaacacttttgttgagtacttattatgtaccacctactctcactctctattatatcacttattactctcaataaccttataaaataggaatcatttctatttcgcaaatgtaggcattgaagcatgaagaaattaagcaacttccttcaacgtcacatatttagtaagtggcaaagctgagatttataattttgtcagaatttagaattccaaattctaaaattaagaagtttattgctaagatggcataagagaggctactcaatgactcaccatatcctttggccccctcaaaccctgctgcctagctgtttcccgtagccttaaagaaaaaaggggtttattccactcaattgcaaactccatgagagcaggaaccatgtctgtcatacccagttttcaattagactgctgatttctttttcttaattgattttgggtgtactttgtatgttagagaaatttttcctttgtatgtaatgagaattgtaattatttccactagtttgtcatttgccttttgactttgcttctaccatgttatagttttgtttattgtttatgtcccctactagagtgtaagctccatgagggtagttattttattttattcttaactatatccctagtgctagagctgtcttgtttataatagtaggttctcagcaaatatttgttcatgaaaaaaaaatcttcctgttctgcaagaccagaaaatgaggtaatatctgaatactgaaagctttgaccttccttggactctggttcctgatgacctggttcctggaagccatcaggtttgaaggttcattgaaaatagctctaggcagagtgtcaggagacctgagttccaggcccagctgtgtcatggcttataacatgaccttgggaagttttctttttgctctgggtattggtctccctgtatcagttcattctcatattgctgtaaagaaatacctgagactgggcaatttatatatttttaaaaagtttaattggcacatagttctgcaggctgtacaggaagcatagcagcatctgcttctggggaggcctcaggaagcttcccatggtggaagacaaaggggtgcaggcacatcacatggtaagagagatcaaggagaaaggagggaggtgttacacacttttaaacaaccagatctcatgagaacttaatcacttttgcaacaacagtaccaagggggatggagttaaaccattcatgagaaaccacccccatgatccaattatgtcccaccaggccccacctccaacattggggattacatttcaacatgagatttgggtggggacacatatccaaactatatcactccctcactctccatttctaaatagggtgaactgtatggtctttgaagggccctcttctctctcccattcacagattggtcaagtggtctaggtaacaagggtgtcaaagatagcaagactgaccaaggccctgccttcctggaactcatattcaaatgagggacacaggcacttgccaaagtatgtcaggatgaaaatataagtattatacaggataaatatagagtattataagagcaaataatagtaaacctaatctggtatgagagtttagggaagactttcttcaaaaaatatttaagacctaaagaatgatctagactaagtaaagttctcaggccttgtatatatgtgtacatacataatattaatattaattatactatatttatattactagttacctaatttttcattattataatgaatatgattatttgttgtacataacatagtgatactatgtaatatataatatatatatcactatatactataatttatagtgatattataaacattatttatattatatatatatatacatatatatatatatatatacatatatatatatatatatatatatatactcacctaacatgtgaaaaaagctttctaaactgcaaagtgataatacaactgtgagggatgaattttctcatttgtctagggatttcttttgacctgttttggacctccatgggtggccctcaatgaaggtttctttgagactggacctgaacctgaatctgagtccccttgggatttgtagggcgacctgctggtgcacttattggtacaaagtagatataatctatcgctgacaaggaaagatatattttggagcctggaactacctctaaccatatattaagctcatttgcctcagccactagtgataaaagatgtcttagaagctgcctggcttatctgcaaatcttggcactggaggccgacagaaaaggggaagaagctctatgggtctctctagcaaccttgactatccaggagatgatcagttcttggacattgtggcataaattcccagcatacacaaactttcccatcttctcattatctcattatctccagcaggactggagactccagtacactgtgttgatagggctagggaaccagaggaagtgggggaagagagacaacagttgaagaaaggctactctgtcccaagctagatgctttatgtacatccgcttatgtaatcttcataacaactctacaaggtgagaattgtcgtatctttcactgataaggaaattgaatctcagagtgctcaaatgacttacttcaagtaatttattaatcagctaagctggagttcaaaccaattatttttctactgtcttccataccacatgccacttggaaggtccattttaatgtctttcgctgtcttcaggctggaacatatcaatttttactccaaagcaggagaattatatctaagttttggggatcacaaataaggaaattctctcacttctcttcacatgaactggtgctcctctggcaggaagttgaacctcccatctaatctgaaccaggcctattgtggtttaagtcaacttcctcttcctttatcctacttttcttctgaacattcttctctgagctgcaagctgcagcctgaaacctctcaggaacctctcattttacccctaagctaagcaaaggggttttagaactggaatctactactccacttcacttgcttcttactactccattggctctgttctcacaaagatcatcaaccaaatagcctgttctcagacactgtcctgttttgtccctcatctgttgatctctgagcctgtacatataatcacatcttaaccaaatttaaaaaaaaaatctttctagtgaccaccacatcattcttcagatcactctaaaaagtaggttccatagattacctcactgtttaacctcctaatctaccataatttagctttttgtctttattctcatttctgcactaaccttggtaactgttgtcacaaaattaccatgaactcttaatcaacaaaaccaaaagcctctctactagccctcactcccttcaatgtctctgcaacaggtgactgtcagccatttcttctttcctaaaacctgtcatcaaatggtttagagaataccctccctctccagactgaatttgatcaccagaaccacagaagtatggttcagatgagatgtaaagatcaaattcatgccagaggatcatagccaattgcagagactgtcttctccatttgtgtccctgatacctagcagaacacctgatcccaatagtgctcagtgagaattgttgaatttacctatactcctctgattcacctatcttcctaaccattctctttggttctcttaacgacgtctctttctttcctgttctttattaaatgtgtttccaaatactctgtacttttgtctttttgttgtgtctctgcacacttccttactctctttctatcttccctacctccagatcagtagattcaatctaatattgaacatatctccctgaatgtctaagtcctcatgccctagaccctacacctcaaacaaacttggtcataatactgtgtttcttatctccatggagaaaatccaagttagaaatatcaatcatcgttgatcatcattatatatttttactaatattctgattataacacttatgaccttaaagtgtgatattttttgtccatgcctttttctcatgagtagcctgtagttccctcaagaaaaagtatctctgtttaaattgatttctgtatcaccagtgtttggcacatagtaaggggccttagtgttagcaattgttagctaaattaataaagggtgatgaggtcagctcccagagtgcttgtatttgaggaagagaatgattttgttcctaatgatgaagaagaatatagaaaaaaaaagatgaaaatgatgttcattttcatccaggaatgtttttatccttaaagtttgatatttattgccaggatgatcttttaataacacaactctagtggtgttattgcactgctcagaaaagatgagtggctcttcattgttttaagcttaaagttcaaaatttgtcagctaagtgatcaggatctttcacaatctgtacacagcctatgtcttcactgttctcttcccatcctatattctgactactgcatgccctatattctagtatacctccagcctttacacatgcctctctgtggacctggaaagcttcctattcccttcacatctattctgtcaggagaccttgtgtttcttcttcagacccagctcaattgtcatctcctctgggaaacctcttttaattgtcctagacaaattcttctgtgcgttgtatgcacctaaattacagcctgattacattgtatttagaatacctgtttacatagttacaaagtgtgctctaccaggcactggctttaacttaataatttttggattcccagatcctaggttaagttctaacatgaagtagcttttctgtaaatgttggttaaatctgactaaaatgcctgctgaaataaatattaatatttgtgctatataatctgactccatcttgacttatggatactttccacacatgttaagtccacaactccaattctgcccgagttaaaatctcttcagatggcaggggtgagtcatttcttaggctccatacctagaacacagtaggcttttagtgaaccatttgaaatcaagatgtgtttggaggtgaacataggccagcacagcaatcgggttgatgagtaatgtcttctttttttttttttttttttgaggtggagtcttgctctgttgcccaggctggagtgccatggtgcaatctcagctaactgcaacctctgtctcctgggttcaagcaattctcctgcctcagcctccccagtagctgggattacagatgtgtgccaccatgccggctaatttctgtatttttagtacagacgggatttcaccatgttggccacgctggtctcgaactcctgacctcatgatctgcccacctcggcctcccaaagtgctaggattacaggtgttagccaccccgcccagccagtaatgtcttctaaacctctgttttcttcctatggacataatgagacaaaatttgaatagagaaaaacacaattgcaaccagggttgcattcctgtcaccttaggtaaggaagaagaggaaatgaaaatcagagaggcgacaaagctgcgtgggctggagggaggaaatctgttgtaaatatcaaaaagcgaagctgaaaataaacctcagccctttagagaattactagtgaagttaagttcaattgatttaaagattgcttttcagagagttcataaaactcatgatcctgaattgagggttgtttgggaaaaaccccaaaccatttttttcctctgctttcacatcaacacaacaatcaacatggaagatttctgcagccaaatgtgtgggatagtttcccccacacacaaagcagcagacaccagctgagtgtcctctaattcaattccaacaccatctacctaaagatagcctcaggtctcacaagttgagggcttatttcccaagacttcccttcaccaaagacatcagtcccaagtccaggcctccagaacttctgactgggcagtatcaagctggggtacccataactctctttttgagttcaattaatttgctagagtggctcacagaactcagggaaacacatttacagttttactatagagaatattacaaagggtacagataaagagatgcatatggtggggtatggaggaagtggtgtggagcttccatactctcccagggcacaccactctgcaggaaccttcacatcttcagctatccagaagctctccaaactctgtccttttgggtttttatggaggcttcattacctaagcatgattgacactcatgtataaatgtgattggataaaaagggtattatatcatactaacagactgggtcagggaagccagcaaggtttatctattcagattcttcttggcctctctacacagcattctttcctcctaggtatgagtcaggaccctctctggaatgagggtcttaggatccacaatcagattagaatgctgccttggacaagtgaaaggagagcaggacaatatcagagagagagagattctgttttctgaggcctgcttctgaggcctaaaggaactgtggatgaaaacctacacacacacacacacacacacatctctcacagagagagattctgttttctgaggcctgcttctgaggcctaaaggaactgtggatgaaaacctacacacacacacacacacacacacacacacacacatctctcacagaggccaagaaagagactacaaaatctagacatagaatgttgtaggacaagagcctgtgtaggaccaggttatgacctacacttagatcctggctttaccactgatccactatggaaaattagacaagtttcttcccttctctgggcttctctgggcttcagtgtccccatgtgcaaaataaaggactaagcttctttgcataacaaaaggagtgagatagaaatgcccttcaaggatatggcttacttctcaagcagagacctcttactatggaccacacggtttagttttacagaacccatgcagttcagttttgagaagacacctggagttgacctgatcatactccatgaactgacccatgcaagtcaaactcacagaaagcagatataacacagagaggcttttttgtttggttttgttttaattccagagctaatataacccaaaaacagctgggaatgctcatgttggctgaataacaatctctgtcttgcttggaaaaatatattctaaaagccaaattaatcagaaagttgcttgatgaaaacatggacaagacaaaacagattaaatgagcttaacaaactcttcttttccccaaacctcatcaactaagatgggatgaaaggaggggtcaggggcacctctttcttttatctgtcctttagacacaccatgaacacaatgaccactttcagttcttgtcactgtttttttttccagtcttcatgcagaatccccacctgcacttctgcgttgtctctgcagctgagttaatccttttgatgaggcttctacaacttatttaacattcagtcagatctcttgaaattccaccttaattagatttctgatttcttcaaggccctgttctttcctgctttgattagtgagagctctcgttccattaagaacttctcaggatgcctaatctattatatggtgattttactggttgaaatctcaggagaaacttctgcttcgggttgtggggaaagggggaggagaatcttactttgctcctacccatatatacaaagagctctgctttctcccctggtagaaatagcactgggcttgggggactctggaagtttcagaggatttccagatacactttcttccttttgagggaatcaatttaaggaggttggtaaccaatgtgctaggttcttatcaagataaaatactatttcatgggaaaagcctttggtcctactgaaatcccttccatggtaaagaagagttggtgagcctactagtcaaagaggacaggttatcctttttccttgcttttcctttcctttccttcttctacttgtccctctatcttcttttccttctttcttctctgtttttttctcttcttcccttcttcactttctcctatcttctccaacaatctggaatagatattagaaccagtgctaggatgagcctgagcatggaactgggtttttaactgtatctagccaccatgtgcattctaagttgcaaaagccagaagaaaaagagaaggaagaaggaaaaaaaggacgagaaagaggaggaggaggaggaacagaacaaacagcagcagcagcagcagcagcagcagcagcaaaaaagggctattggaaacaaatgaaaatggatttgatctctctccagttcttgcagcaataaaaaaaaaattctaaaaatggatttaaaacaccaggtcccctcccaggaaagcatatagattttgggctcacccccttccaggacctctctccccaccagggtaagccttatctacccaaaacactgtggtgcagtttctgctcttcctgaaaatatctgcagctaggagaagctttgctcatattcaaaggcacaaccataccgtaaaagagctcccagataacttttatcctctgcattcaagaaggagtagtcctcccatccatatcttcttcctgggcagtgccaagggactggcttacccacttgggttatagttcagatgagactctttcagctttaccttggtcaatcaggcatagagttaaaaagtaatgtacttatccattgggcaacctgagataaaagcactttgtcttccaggacctcagcttcctaactggaggatggggtcatagattagatcaactaatctctccaagttataaaagcttttagaggccaaaaagtctcacttccttgttacacctataagaatgctgaggctcagggaaataataaaaaaaaaatccatgtgagaaagggactagcttgtgcctggctggacatgatacatagtaggctaggtacagtgactgtaatcccagtacttcaggagcctgaagtgggaagattacttgagcccaggagttcaagactaccctgggcaacatggtaaaaccctgtcgctacaaaaaaatacaaaaattagcctggcatggtagtgtgcacctgtagttccagctactcaggaggctgaggtaatagaatcttttgagcatgggaggtcgagactgcagtgggctgttacaatgccactgtactccagcctagacaacagagcgagaacctgccaaaaaaaaaaaaaaaaaagacacacagtacatgccagttcccttctgacctcttagcagggatgggtcaaaaatacaaggggattcctaaggttgcattcaatgcctttcacctttcctgtataccacactgccttaagatggctatgaatcctagttggcttgactatgtgcaccattggcactttcttatctcagggtctttgaaattcccttcaacccatggctgactccttctccttctcattcattcttcaggtcttagcttaaaatattctctctatggaatgtcttccctgccaaaccaagataaaatagctcttcttaccccttttccctcatatgcttggaaccctactgattttcttaatagcacaccttaccattcggaataattggttttttgatcaatttatatgtttactgctgatcacctccctggctctaaacactgcatttttgtgattggtagctctgtgacataaacagagactgtttgttcactgctgtattggatattgcttagcttagtacttggcacgtggtaggaggtattaaataatattcagtgagtaaatggtgcctctgacacaacataagttaggatgggaggagttcgcatcactaggtcaatgttatgattgagttgaaattaagaagttgaaggcatggaaaggcttatgagctattaagttgaatgaatataagactagtcagggcaaggctcacactctatacatggaggggccactaggtaagggcaactgagcagttgagtttggaaagagactgcctcatggtttacttttctggaacttgacatacttgagtgtaaaacagaggtcataatctttgccctgcctatatcatggggctattgtcatatctgatgtaagaaagatgtgaaaaaggaaagtaggatggggagggaactcatgggtgggtggcttatctgccaccacctctaccccaggcttggcctgaagtggcctctgtaactgcctccccagcttctggactgcagagtcattgtggaagggaagtcccagcagcaacagtctggacttctagcccatacctcctcagttgctcaagaatgacggttggtttttgcatcagcctctctgtgtcattctgtcccctaccccattcccatactgcctccccaaagactatgtgtggcaattttcaggctgacatttctccatcaatgtggcaatattctggtctcccatagtttgctcagggaccctagggtggtgtcctcctatgtgggaggaaccaggttctctgggcacctcaacatgataactggtctgccaggaacatgtctgtcaggtcatcctgccctcccacaactacttataccttcgagggtttatgttaatctgacaagtgggattagtctttttggggcccagcactggaaatttagtttagatcagatcaggtcccaaaacctgtaaacaaagtagaagactagtctgagctatataaaccagatgctagccctacctcactctcatctcatcctcttaatcataagaaattccaccctggacaacatggtgaaaccccatctctataaaactaaaaaaattagccagacatggtggtgcatacctgtagtcccagctactcgggaggctgaaataggaggatcacttgaacctagaaggtcaaagctgcagtgagctgagatcacacaactgaactctggcctgggcaacagaatgaaatgctgcctcaaaaataataaagaaagaaattgagttaattatgttagaagatggagagatgcagatgctcatccttggcaatgtccttttcctattatttctttcattcatttaacaaacacatgggtacttattataagtcaggtccctgtctactggggaagatagccaaataaaatggtgttccagttagcccaatatgttcaccattataacatgttcaagtataatatataatatagtatatataagctacagtggcaaaacagaaggagtgattgactttctagggatgtcaggaacagtttcacagagatttgaactgaaacttgaaggattaacagaatattaggcagtttacaggtaacagtggcaaaatcatcataggtattctagaagcgtgtcctaacacagcatgtgcaaaagcatgaatatataaaatggacaggcaagtttggtgactaaaattctgtatggtttgagtacatgacttatcttgaatagtggtaggagatgaagctggctagatgtggaagtctgcattactgaggacttttaattctatggtgagtttagaatttgtctccaaaacaatggaaagtaattgatgggaatacttaaacccattcagcacactccaaagtatgttttctggacccacattagaacaaccagtctaacaaatgtgcatgtggttacagaagcaataagaccaaatatttgaacctggactatgctgggaaatctgatatctatattcaccatatttattaccaccactgcttaaagacaaaacttgtccatttttggatcaaagatctgtagatacagtcagaattcccattttgcatacttgcctctagaatgtcaagagcccaaacttttctaaaaagaacagatattagccataaagaaggaaagtgccagtttagcagaaaaccaaagattctgctagcaagcagacaatgggtgtttaccaagaaaccgtgaaactctagacttgccatggatgagggagctgacacagcatggggtgtggatagagaagagatgcaagtactagatggcaattaatattatacgcaatcaccttcatctcaaaagtatctcatttatttgtctctttatccagctgttctctatttatttaggcctaaaaagttaactagtttcagcccatgtgctaagaaacaaaggacagtgttccgctgcccaaattcatatgttgaaaccctaacccctagtacatcagaatgtaactgtatttggaggcagggcctttaaagaggttattaagttaaaatgaggttgttagggtagtccctaatgcaatctgactgttatctttataacaagaaaaaattggggcacaaaaagaagccaaggatgcacaggcacagagcagaccatttgagaacacaatgagaaggtggccatctgcaagccaacaagagaggtatcagaaaaaaacaaactggctgacacctaatcttggacttctggcctccagaactgtgagaaaataaatttctattgtttaagccacccagtgtgtggcattttgttattgtagccctagaaaagtagtacacacaaaggccattttttaagttctctgtccactgatgcccttcttaggcctgcccttcctggcaaagggaggtcttcttagtgtctagtatggtctttctcctcctctttaaccactatgaccgggtcacttcatgggcagcagagcttgagcagtgaagccagcttcctgtatcttctactttatgtctgggaaaggtggcaagtgattttgtcactggcaggtttctcccctctgtgaggtcaccagaaatggtcagaaacaggaaagccctggcaagagtagcattgatgggagttcctaccaatttttaggtaaagacacaggaaaaagcagaaaagttctggattcttaattaagagacctggattcagctctgctcataattagtcatgtaacttaaacaaagtcctttctctctctgaacattggttttattattattcacaaacagggagacaatatatatctcattgatatcttatggtgactacattaaatgatatgtaagagctgattattatcagttctgagttgagccttggatagttattgtgataatgtgccaaatcccacaagaggcacaccctccatccaaccccacctcctctagttgctcacggagaggtcaagttagaccacacggctcttgcaaactgaccaaatccaaatcaacaaggaacctatgagctcagccctttgcagaaagagttgagcctgagaaagaatttggacacatattactaatgagatgggaattggatgtgtctcaagtctccatcaaggcaccacgttgtgtcccaagtccaatctttagtaagatataggaggaatagaatttggtgtacagaaaacagaaacctactcaattatgttgtgacttggctgaggttactgttgtgttgtcataacagaagagtgattggctggctggtgggtggaggtgtctccatggaggttagagaaagaggagacaaaaacaaaagaatatgttaatgttcctctgacactcttcaaagagaggggccactgagtctatggatcaacctgctccacagagacagaagtctcctaaaagctaattcatccagctaccctagctttaagaaaatgttccagaatgccatccaagccattttgccttacttttccattcttcaaacacccctgtgctctcaagtctgacatctgagcagactcaccctaggacagggcagcttggatgaataacaggtgtgggtaattcaactttgtttctggagaatggaaattagtttccctgtgcctgaccaattctagatgaggtgataattaagtttctggtctcaccaagttgaattcagaccttgaacttatggtgatctccctctgaggcctactccctgcctgtagtcatctattggtaaaaacacttgattaatttgtttgaacccctctggatcagaagttcttactcagttctgaattcttcccggttctctccttcttgctacacacacacacacacacacacacacacacatacacatccaggatggagaagatgtggcttagaagcagcaagtgtagtacagtctagggatttgggaggacagtgagctcaatatgtgtcagttatgaggtagggtggcaaaaacctaatgctatctttaacagtaatcataaaaatgcagtgttcagaaccagggaggtgacaatcctgctctacttagcattggccagatcacaaatagaatactttcccttctaggcaacacactccgagaagaacactgacaaagtgagacagcccccgcccccacatttccctacagatggctgtgtgttcaaacctccctctggagcagccctagcctccagagtcatcacagcccaaccctgtttgtcacccagtcttgagccatatcaggagccatgaattctaaataattgaggatcttatgttctcatgcctctctagctttgggagcttaaaataactagtcaattcaagtaaaggccattctgttttgttataaagcattgtaagtagcaacccgcagtccaaaccctttttggccttagaaaggctttcctgggttccaagcctaggtggggatctcatagtcaatcatgaaaagggtggaaacattggggtacaaaatagattaactggaccacttccccaaattctgtggatctgtccttatataattatttcaagcagttcttgctcagtattgtgatatttttcatggtgaatgatgtctctccagtgaatcaattggaatgtgatagatcacactctgagaccacactttattctccattctattaatacatttcttgaggttgaaggtggtttctgaagaattctgaggtggtgagttttcttgagcatagtgttactgtcttcttgaaagagtaggtacaaaaagtctgaggtgctgtctgtatcatcctctcttctgatacggcctgttgatgtggttcatgttattttcactcttgtttatgttgttgcttttgttcttctggaccttgatattctttccattgctctggttttgatgttgctaatgtttcttttgctgctcttgccggggttgatagtgctctaatggagtgcacagtcccactagatttccccaagtcatagctttccatgtttctttagaagacacttggcctatccatcacgtttcttgtggttttcctagagcaattgtggcactgggattacaagccattggggatacagaggatagtctctacctctgcatttttggccagagattaatattgaagtgtttggccagtgtttttatagcttactccatttcataaaagattatctttcaagcagattgtgatcccaaagctaatattccttagggaaggagtatcagagatgagaccctttcttattggctatggccctttgaataagagcatctgctactcaccctttctctagtccagtatacccaacgatccagcggcccggctacctcaagctttttgttcaaggtacttttctttcacaacacttataactatttgtaatagtgtatttatatgtgtgattgtttaatcaatgttcatcttgccgacttggctgattatcagtttcaacgggaaaggaactatctctcttttgctcaacattgtatcctcaggagtttggcaggtaccaggcattcaacaaatatatgaataaaatggatgccaagtaaagcccactttcctaataacattcagaatgttaacacaagctaacactgtgcatatttacttagtggcatttcatttataaacatctaatgtgattaaaaaacaacaaggtagaaaagtgggcgaaaaggataaccaaagtggaaaaatgggcaaaggatttgaacaggcagtttgcagaaggagaaatacaaatatttgttaaggatctgaaaagatgcccaattttgctaatagtcagagaaatgcaaattgaaaaaataaaatgctctttctgattagcaaaaaatttaaatagttttaagtttggcaaaggcatggaaaataggtaatctgaaacactgctgatgaaagtataaattggaacaatcattctggagacactttttcaagatatactaaattttaaaatgtgcatccaaatgatatgacttgcttcagggtaatccaatgtattccagggggagtgtaaatagagtataaatgaaacaagattggccgtgtattgataattgttgaatctaatttttagtatgtatgtgggttcattataaaattttgtacttttaaaacatgtatttgaaaatttccacatttattacaaaaaatgtatttcatttttatattatcagttgaaacagtattctgaatatgttggtctaaatcaaatacatctttaaagattttttaaagcaatataataaaaaatatacatcctatgacctactaatttttctccttgctgtctatactaaaggaacattctcacacatatgcacaaggagtcatgacaaaaatatttactccaatgctatttgtaatagtgaaaaattggatatgacttaaatctacatcaatagtgacatgattgaataaacaatgatgtatctatactacacaatactatgcattggttaaatagaatgagatatatctagatattcatgttattgaataaaaaagcaagtttcagattaatatgtacagtatgataccatttatacagaagataaacaccatacctaccacccaaaataatgtcatacatctcctatgaatacatgtatgtgtatggaaatctttagagaaccacatataagaatacatgacagataataatagtggttatttctcataagtggggaggggaccaggattgaggtaggggtatgacaggtgatcaaaagtgacattaatcttatctgtaagttttgtatatttcaaattttacaaggataatgtattatttgagtacctaaaagtgacttttaaaatatccaaaaataaaaatattaaataacctggaaagatgtttatattaaattgctaagtgaaaagaaatagcttacaaaacagcatgatcatattataagaataaatatacacatttcaagagtaaaaaacttggtagaaaaattttctaaaaaagaataaatatacacacagaaaaatgtctgaaggaatgtacaccaaaatgtttgcaggtttatctttgggtcgtgatggtggtagaattgtagataattttatttttaaaatttacttacctgcatttttgcatttttctataataaatatgtaatgtctttataataaaaataataagtttaaacagtatgatagtcactgagtttgcctaaataaggaaatagcactccccacccctaccctcccttaacacacacacacaaagtgaagcagaggaaaatcctagatggctagatggaaatctctgctctgggtagaagggcctttgtctctgtgctactcaaagttctggtcagcaaacactgaacagcttattctgtcaggtcctgtacagagcatggggactggagtgggagtggcagaactacatccaaatccctgccctaaagttgaacttgtgcttgaggctccttcagtgtacttcccactgcaatcaccttacccagacacccattccctctctcctcagcccccactgttaacagaacatacaaatacagaaaaataatttccaacacatccattacaggttctaaattccttctgaaaagcaacaaagaagctctgagtcttctaaatagctacttctaactttcagtgagctactctaacctattccttctctttcagctccctgtttcctagccccaggaataatcctattttctttatccactcttggtatttttctacccttactcccaggcaaacgtacacacacaaacctttcttttttaaaaaatacttatattttcccttgctattacagaattaaaacttgctgggagcagaaaactttgaaaggatagggagcaaaatatatgtaaagaaaaacaatccatcataatcctataacccagaggcaatcacagttaatatttttgatgcttttctttctagacctttttttgagtgtgcgtgtgtattttgtttcatcctaattgagatcttacttttcatactattttgtgttctcctttattcacttaacaccataaaattgacgtttccccatgttgctaaatattctttgaagccatggcttttaatggctgcataatatctcttaccacacttatttagttataccacacttatttagccactcatcagaacattttaatgtgatccattaaaatatctatcatctatctatcatttatctgtctagataattcttaaataatttcctttataaagagtctttaaataagttaaattacaccttcctatctatccttctctttatctctccttctctaaagcacttaataaaaaacaaacaaacaaacaaacaaaaaacccctcaggcccttttgctagtttaatgattccactaaaagtcctcttccaaccttagttctaatttataataaggcaccagcttagtctgcaactgtttagaaggagatgagcttagaattcttacccttccatactaagagaattcaactcttctgctttggagaactcccattaaagattgaccctggtgagacctgttgccatggaaagtgtcctgacatgtaacagtgcttttgcatgcaagtcataaaaattatctaattctgtaagtgggaattcattctcagggatggtgtgagggttttttataaaaaggatttttaatattgcccagtgcagtgcttggcatgtagtaaacacttaatattgtagttcaatctgctgataacattctggtaagcttgagatgattaactgataaggcaaataattatttaattgagccagtgtttgttacacaagccaaagtctaccctgtggactgggaccatttattccagattcagataatgtgacctattgtcaaacccgtatttatttacatttggaaaatagattcatttgaaatatgtgcctagatattgcactaaaggtatgtgagtgtcaccaaagaagtgtctctgctcttgaaacagtgaaaatagaattgaaaagatatttatccctgaataaaaagagacaatgaaaaggcattcgagtattccgtgctaaccatgataaaaatgtaggtgttttggagtattaagaaaaggctttgtggagaactttgaattaaacctccaaatcgctgcacaggtgagggtggggtgggggttgcggcttaagcaaagatataaggaatggaataaacctagttccctagggtaactgactggggcaagatgtaaggagtgaaaggccctgaatgctgaaattaaaagcaagacaaaatgaatggcaccttagtatactggctctaaaatcagactgtctgggttcagatctgccacttacaaaccatatgatgctgtgcaagcaatttaacctttttgggcctcagtttcctcatctgttaaaaaggataataatgctacacacctaactcatagtgttttgtgaagatttaaaggaaaattatatatataaataaatatgtgtgtgtgtatatatatatatatatatatataaaattgaggttcatcccctgtcatcagacaaagagaaagtcagttatcaaagaaaagcagctaatggcagaagaagctgcaaggactgttttatctggtaagaaaaactacattaattatttggtatatttccagttcctgaatccataagcataaatgttgttcaacttgccatgcatttccgagggttctctttattcccgaataaccctattttgtagagtaagaatgacctttgactgggtgcagtggcttatgcctataatcccagcactttgggaggctgaggcgggaagatcacttgaggtcaagagtttgagtccagcctggctaatatggcgaaaccttgtctctactgaaaatacaaaaattagccaggcatggtggtgcatgcctgtagtcccagctacttgggagccagaggcaggagaattgcttaaacccaggaggcagaggttgcaatgagcccagatcgcaccactgcacttcaacctaggtgagggaatgagactctgtctggaaaaaaaaaaaaaaaaaaaaaaaaaaaaagaggacctttattgaaaatttggctcagaatggaaacatgtcacactgaccagaacaatggctcagtgtgactcctctagctctcaggaccctgagtctggagaaattgtgcaggaaatggaaattaaccatgaagtatgctaatgaaagtgttgttaatgagccttcactaagcttgtggctttagtgcttctttaagtacacttcctaacaggaactggtagcaaaagcactgaacttggaatcctactctgcctccttcccctagttgggggcaagttcatctctgaacctttgtttcttcttctgaaaaatgaggacctgatttcacctccttacttctctcctagggttgccgaagaacccaacgctcgtgagaagtctttgttcaagggaagccttatacatgtgaggaagtaaagttaggaggctgataattattaatacatgcacccaaataagatgtggggaaagaaggagcactatttggaagtattatgagaatacctgtgtgatttgaggccaatgtattgtgacctgcatgtttttcatggaacagcaaccatccctgaaaatattctggaggtcagtggataaatatactttgataaacaaacatttgcttcctacccaatctctaggcctgtaagtaaagaggaaggcagagcaaacaggacatagtctgcatgttgatttgtttgaggctggtccagatgtctggaatctatcccattatttttcagttaatttctccacctttctccccctcctcatttttatcatccgaaggcctagaaggcaggagaccagggtttcattcccatttggtcttggactcatattatacccctggacaggcttaaaaatagtttattttgttattttttggcctgcttgacaaataaactaaacaacttagtatgtgggggtatggtaatagcctagaaaatgtatttacttataagcttcagaaattgtgtaaaaagagagaatgaggctaaagtccagaatactctgcctggcacacaaaggctgccacaatctggctccaggccccactcccccaactccttcatccccttactctttatctgaaaatgtcttattatttccccatacctataccttagtgctgactggttccttgtcctgaaataatcttcccttctccctcttctataacaggtaaattaccctatatccttgatgatccagcacatccaacatgactctatcaacaatataatcacattgggttataattatttttgtctctctgtcataagagactgggagttccctcaaagacagtatctatttatttctatgtcttaacactattcctaccacagaattgtcaactggcatttatggaagggagggtgaatgaaaagggagagatggaatgagggagaacagaaaggaagaagggaggaaagtgaattggataaaaaccagaattccaagttcagatatatggtttgaattctaatccagtcactttgtagttaagatgctttgtagctgaatgtgtagagcaaattaacttcacatttctaagcctcagtttccttatctgtaacactgggctaattctctctaggcctgtctgcttcactcactccactgcatggaataagggagggagaaataagagaaggtagagatgaaagagaaaacaaagagacagaaaagaaaactgcaatctctgagaaagggaaaagtttaaggttggggtaagtgtacctccggttgtaggaaacaaaaaccactagagggcaatgttaacgcagggaaattttccctagtaacaaagggaacaacccacaactggatgggccaggtcacacaggagccagtcctgatggagctcagtcagaactgtgaatcccctgttaggtttggtatgtcgcaccccagatgactgacatatataagagccacagctgcctagtattcacaaatggtaagagtgagtcattatttgttagaataaggctgcttgagattgttagcgtctatcactaagttacaatgtgtttgagttctcataaacatgctggaatgccacacttcttcctcctcacagcagggtctagagtctgtcttcttgcctgtcaggctgtcttgcatcactacacaaactctaagaccctcccgggcaccatgtttttactcctttccatcaagcacacattggattacagtgtttacctgctcagaagccacctggtgctcttcattgcctcctaaagaaaattcaaaactttcagcctggttctaaaggtttattataatctggtaccaacaaactttaccagtgtccctctttgccctttcatcaacctccgtggagcagccaggctggactgttccctagtctctgaacatatcctctgcatagttctattgacttgacttggctccgtccattggaatcttccatgagatgaaaccttaattatctttaatgacattgtcacacaacattattcccatagaagctttcctaattctactagtcacaaattatcagatgcttgagactcgtctgtgctttatctatgcctttcacttatggcattgatcacattctaccttatgttagatttgtttaatttatttacttatttattcttttgcttaacatatattggttgtatattttatatcagttcccatgtgaaggactcataaaagattaaggcttaattctggctctccaggatctaagtgtcaaactagagaatgacagatatataacaccacattagttttgcgcatgttacgtgataacaaaggcacatcaaaggattgaggaagctagattggagccatactggaatgccaaaaaaaaaagagatagataagaagacagagagtgtatcttcagataactgctctatcaaatacttagcatgtcaataagtattgactctatccagtagaaaatgcggcattataagggagtttttaattggagagtgggccaaggatttgtgaattgggccaaggattccagaggagataagaggggcaattacaatacatgtctattttccctactaaatgtgaagttgcttgggagcaagaattttgtcttaccaaattatgcccccatgtcatctggaacagggcctttgttattgaaagtttatgcatttgcggagtttccagattggaagagactttaaggattatctagtctttgttctacaaatgagaaagggaaactatgagaaatgaagtgggtttttttcagtcaaccagtttctttttcttctttttaaaaaaattattatattttaaatttcaggaaacatgtgcagaacgtgcaggtttgttacataggtaaacgtgtgccatggtggtttgctgtacctatcaactcatcacctaagtattaagctcagcatgcattagctatttatcctgatgccgtctctccccaccctcctgacaggaccccgtgtgtgttgtttccctccctgtgtccatgtgttttcactgttcagctcccacatatgagtgagaacattctgtgtttggttttctgttcctgtgttagtttgctgaggatgatggcttccaggttgatccatgttactgcaaaggacattatctcatgttttgttttgttttgttttgttttgttttgtttgggctgcatagtattccatggtatatatgtacctcattttctttatccaggctaccattgatgggcatttgggttgatttcatgtatttgctattgtgaatagtgctgcaataaacatatgtgagcatgtatcattaaaacagaatgatttctgttcctttgggtatatacccagtaatgggattgttgggccaaatggtatttctggtttcagatccttgaggaatcaccacactgtcttccacaatggtttaactaatttacattcccaccaatggtgtaaaaacattcctatttctccacagccttgccagcatatgttgtttcttgactttttaataatcgtgattctgactggtgtgagatggtatctcattgtggtttcgatttgcaattctctaatgatcaatgatgttgagatttttttcatatgttttttggccgcataaatgtcttcttttgagaagtgtctgttcatgtcctttgcccacttttaatggggttgtttattttcttctaaatttatttaagttccttgtaaattctggatattagacctttgtcagatgggcagattgcaaaaattttctcccattctgtaggttgccttctcactgtgatgatagtttattttgatgtgcagaagctctttagtttaattagatcccatttgtcaattttggcttttgttgaaattgcttttggagttttcgtcatgatgtctttgcccatgcctatgtcctgaatggtattgcttacatttttttctatggttttgggttttacatttaagtctttgatccatcttgagttaatttttgtgtaaggtataagaaaggggtccagtttcagttttccgcatatggctagtcagttttcccagcaccatttattaaatacggaatcctttcctgattgcttgtttttgtcaggttcattgaagatcagatggttgtacatgtgtggtcttatttctgagatctctattctgttccattggtctatgtgtctcttttggtaccagcaccatgatgttttggttactgtagccttgtcgtatagtgtgaagtcaggtagtgtgatgcctccagctttgttctttttgtttaggatcgtcttggctataagggcacttttttggttccatatgaattttaaagtagatttttctaattctgtgaagaatgccaatgggagtttcatgggaatagcattgaatctataaattactttgggcagtatggccactttcacaatattgatttttcctatccacgagggtggaatgtttttccatttgtttgtgtcctctcttatttccttgagcagtggtttgtatttcattaggaggtccttcacatctcttgttagctgtcttcgctggtattgtattcttcttgtagcaattgcagtcacccagtttctattgtaagaactaagaccaggtacttaaagttccatgttcttttaactcctctacatctcatatctcaaaactgtcaacagtcttcattgtggctgagacttctaacagtagagatctgacatatgtctctggcatgttggtttgaaaaggaacactaaggaagatccagatctcactgtatacctgaggagactgagactcaaagaggaaaagtgactggtccatgatcatagatctggagccagacctgggcctaaactcataagatatttggtgagaattgaatacattctctgtaatcaagacatcatgccttgcattagctaacaagtgattattcttcactttagagaataaacaggcctccatctgacatcatttgttgtttaatcttcatctccaacatgtatgcttttgcataagtcttttcatagcctggaacgtttgtcttagcaacaagaataataaccaatgagcttctctgaaacctctaagcaatttgtaactacccagagaaaagtttctccactccctccatttgtctcttccccttcttccctactgctgtcaaagggtaaaagaaagaagaaaataaaacatatataataatttccagacagtggttttctttgtggaagttgaaaggccatctttcagaagctctgagatcagagggcattgaggctgagctgggcagaggaaaagcagctgggtaccagaaactaccaggcctcgatgttaagacattggtttggagtagaaatggagctgtttggaagagcagggatagagacgattggggctgtgaaatactatacaagggcttgaactgacagatatgtttttgttttttaagcaaatctaagccaaattctcatcacagtttaacaagagcaccagagactgagttattctagccaagataaaaattccctacgttccctgaacctggatcccatacaattgtgagcaaaatttttaaacaggttcttcctcatatggaactttggaaatcagttgttcttccccattttatagggagaaaattgaagttcagagtagtgacaagatgtaccccagttcactcgtttgttacagagaagataggaacatttgagttctgattccaaattgattgctccttccatgacaccaaatgctgttcaacattcttgcttattccccaagccttctgggaaaggaaacacttgtgaatctgaagatcccttattctagcacatttctcctgtttctctctttcttcttccagaattccatgtttatctggtgcaggtgaccatcttggtgacttccttgacttctcccacaataaacaaatgtagacacacacacacacacacaaacacacacacacacacataattatatgtgtggtgatctgaaagacagtttctagggtcattttcaaaaacaaaataagatcttatggtccccggataaaattcacgtcctaaatctgttatttcactagcaccatggataagtatgcctgaatcatacacctcttagtgcttgggccaaggaagtcagagagaatgaaatgagtatgatagcaaattaatggagtttttgggatatcttatcaaggtcttgaacccagacaggtgagcttccttctaacagcaggctaaaaattagataagttctaagaatggacgtaggggtatgaaatccctactgtttatcctgtgatgtcaggcaagtcatttaggctctctgaacttcagtttcctcatgtataaaatggggcagataaagccctgttgcatagggttagttaaaaaaaaaaaggacaaaatcccaagtaagtgatagactctcaataaatgttcatttccctgtcattcaccaatttttctgactgcaccttttatcttttactggtgcattccctttttgaaaacgtaggcacatctcaaagttctctccttggcccccatcttttctctaaacctatttcctggccctcccattattcctattgtattagtttttacttattttcaaaggagtcccatgtctcttcctttagctttgtatcactccagagtctcttctctatttccaaatatctattggttaactgcatttagataactcaccaaagactaaaaagtcaataaagacaatttgtttaaatgtgtatgctcactgagaaattatcagttccttagatcctataacttttttcttttttatttcttcattctttctccatccagttcctaccacagttcatgaaagttaatagatgatcaataagtctatgttgaagaaatgaataaatgagtgttcaaataaataaatgaaaggtggatactgtgttggctaaggatttatataaacaatgaaggtcctcgtttagtctgaattttccaaagcaatcctaattttatatgttctgtttgtttttatttcagttcaagtgttagtctccatgtcagattctgtggctaggtagattttcaattaggaaaatgcagttcctataacaataggctaggtgagagaagataaaaatctgaactacaacagtggtggtggagttggattggggggatcatgatgagacacacagaggtaaaatcatatataacatcatctttgtatagcaagaagagcagagttgtgtgagaggcagcacacaatttctattagcatctcactgagataatatgagcctctctttgaatctgctttgttgcctgagccctgtctggtacccagatgagcttccatctgagtctccgtgtaggtctcagtaaataaggaccagcctcttgccccaacactacacagagacatctaagccctttcagaattttttggcttgaagtttgctggttctagtaggatgcgcgatgcatccttattactctaacctatcataagtgcttgcccaaaacctaatccagcaccatttaattattgtggcaatctgacccttcctctatttctcaagtgtgtctttccctgggagactggacacttccaattacctctcttatgtcctgcctcttcctatcaccagcttcacttatgctttgctgctcaccactcccttggcatggttttcttcattcattatctcttccattcatttatccatccaaaaaccatttcaatccaaattagttcatcaaacattaccgactatgaatgcatgccaggcctttcactaggcatcaaagttacagagatgacagtcactgaatacaaggatccctcaggttagtggagaaggtatttatctattgccgcttaacaaaccacctcaaaactagagagatataaagcaaccattttatcatgctcatggtttctgtgggcaaagaattggaatagggtacagtggagatggcttgtctctgtttcacagtgtcttgagaatttgaaggactctaagactggaggtaatttaacagctggacgatatcactgtggaggaattaacttaaatgttggcttgaacctcagctggatttatactcagaagctggcagaacagaaacagggaggcatcattaccaggtacttcacaaaaaaactggcagggacaccagttctcaattcttttggtttgtaaaaaccttactcaagcacttaatatgcacaaggatttgctgctcacatgtctttctatctcatatcccagtttttcaggtgtttccccaactattatctcaaaagattttaccaaccatgcttaaaggtcagtgtgacaaaagtgaggtttgaagtcccccactgatccttatacagagttgagcatcaagcaagtccaaaaggaaatatttatcctgttgatttatatcaaaatccaaaggaatttggctgggcaactgtgtgtgtgtgtgtgtgtgtgtgtgtgtggtgtcaggcgtctgcttccatatgtggctgagtgtgaggccagccagggtgaatggtgtggaaggttgatatacttggctccagtggtctgagatttttcaactttagatatttcaccttgctgtgtttagcacatctttcagccactcattacccagagtgagagtacaggtggttttcagagctgtaaacaaaagggcaggatggatgaaacacccgtgagtggcctgaaactccaaccaaaaataataaggcctctccagattaattctccatagattaccccatctatcccactaccccttagacatttcaggaagagatagaaaacagctcgaagtggtagaatgagccctgggcaaggagagaccagggcacatatcaaaagcccatattttcaccaacaacagtcaagctgagagccaaatcaggaatgatctcccattcacaattgccacaaaaagaataaaatatctagaaatacagcttacaatggaggtgaaagatctctacaaggagagctacaaatcactgctcaaagaaatcagagatgacacaaacaaatggaaaaacattccttgcgcatgggtagacagaaccaatatcattaaaatggccatactgcccaaacacatttatacacccaatgctattcctattaaactaccattgagattcttcacagaactagaaaaaactattttaaaattcttatggaacaaaaaaagaaaccaaatagctgagacaatcctaagcaaaaagaacaaaactggaggcatcgctctacccgacttcaaagtatactacagggctacaataaccaaaacagcatactggcacaaaaatagacacatagaccaatggagcagaatagagaaaccagaaataaaatcacacacctacagccatctgatcttcgacaaacctgacaaaaacaatcaatagagaaaggattccctattcaataaatgatgctttgataactggctagccatatgcagaagattgaaactggaccccttccttataccatacataaaaattaactcgaaatggattaaagacttaaatgtaaaaccaaaaactatgaaaaccctgggagacaacctaggctatatcattcaggacatagacacaggcaaagatttcatgatgaagatgccaaaagcaattgtaagaaaagcaaaaattgacaaatggaatctaattaaactaaagagcttctgcacagaaaaaaaaactatcaataaacaaacaacatacagcatggaagaaaatttttgcaaaatattcatctgacaaagttctaatatccagcatctataaggaacttaaacagatttacaagcaaaaaagcaaacaatcccattaaaaaatgggcaaagtacatgaacacacttctcagaagacatacatacagccatcaaccatatgaaaacagctcaacatcactgaccgttagagaaatgcaaatcaaaatcacaatgagataccatcttacacccgtcagaatggctactaaaaagtcaaaaaataacagatgctggtgaggttacagagaaaaaggaaggcttatacactgttggtgggaatgtaaattagttcagccatcgtggaagacagtgtagcaattccttaaagacctaaagacagacataccactcgacccagcaatctcattactgggtatatacccaaagaaatataaatcattctattataaaaactcatgcatgcttatgtttgttgccacactattcacagtagcaaagacatggaatcaacctaaatgcccatcaatggtagagtggattaaaaaaaaaagtggtacatatacaccatggaatactatgcagccttaaaaaagaacaagattgtgtccttttccgggacatggatggagctggaggtcattatccttagcaaactaatacaggaacagaaaaccaaatactcaatactgcatattctcatttacaagtggaagataaatgatgagaacacatggacacatagagggaaacaacacacactgggacctattagaggttggagggtgggaggagggagagtatcaggaaaaataactaatggatactaggcttaatacctaggtgataaaataatctgtacaacaaacccccaagacacaagtttacctatataacacatctgtatatgtactcctgaacctaaaaacatcgaggcaaggccctccactgcaaaaagattataacttgctgaaggctctgatgattgttagcatttttagcaataacgtgtttttaatttaaaaaaaaagcccatattttgcttaccacttaaagactatgcttgcatttttgtttgaattccaacccctaaaaagggcattttgtttattttcttctgaagttctaaaatacctatatggtaagtaaattgcattaatttcaactgtacatttgatgagttttgattaaaatatacacctgggggtcaacatccaggtcaagatatagaatatttccatcgttcccagatgctcccttaatgccccttccatttgataacttcctagaggtaatcctttttctgagttttatcactttggattagttttgcctgttgttcatataatgtataaatatataatgcctgaacttcatataaatgtaatcacacaatatgtgtacttttgggtctggtctctttcactaagcatgtttttgaaatccatttatattgttccattttattagtcatctatttctgtgtaacaatattaccagaaacttagcacattaaaataacagacatctattatctcatagtttctgtgggtcaggagtctgttcatggcttggctgggtcttctgcttcaggatataaagctgaaatcaagatattggcaagggctgtggtctcaactgggaacaggaaaatatccacttccaaactcatgtagttaatagcaacattcagttacatgcaggctgctgactgaggacctcactttcctgctgcctattgaaaatgtattatcaatggagctataaacactcacttgaattgagtgcatccccaggactactcctggggatctctgggtcatagatagcatgtatatttagctttatctccctctccctctccctctccctctccctgtccctctccctctccctctccacggtctccctctccctctccctctctctccacggtctccctctgatgcccagctgaggctggactgtactgccgccatctcggctcactgcaacctccctgcctgattctcctgcctcagcctgccgagtgcctgggattgcaggcgcataccaccacgcctgactgttttttgtattttttggtggagacggggttttgctgtgttggccaggctggtctccagctcctgaccgcgagtgatctgcccgcctcggcctcccgaggtgctgggattgcagacggagtctcactcactcagtgctcaatgttgcccaggctggagtgcaatggcgtgatctcggctcgccacaacctccacctcccagccgcctgccttggcctcccaaagtgccgagattgcagcctctgcctggccgccaccccgtctgggaagtgaggagcgtctcagcccggccgcccatcgtctgggatgtgaggagcgcctctgcctggtggcgaccctgtctgggaactgaagagtgtctctgcccgacagccgccccatctgggaggtgaggagcgtctctgcccagccgccccatctgagaagtgaggagtccctccgcccggcagccgccccgtctgggaagtgaggagcccctccgcccggcagccgccccatcagggaggtggggggcagaccccgcccggccagccaacccatccgggagggaggtggggggcagcccccgcccggccgctgccccgtccgggaggtggggggcacctctgcccagccaccccgtctgggaagtgaggagcccctctgccccgccgccaccccgtctgggaggtgaggtgtacccaacagctcattgagaacaggccatgatgacgatggtggttttgtcgaatagaaaagggggaaatgtggggaaaagaaagagaaatcagattgttactgtgtctgtgtagaaagaactagacataggagagtccattttgttctgtgctgggaaaaattcttctgccttgggatgctgttaatctataaccttacccccaaccccgtgctctctgaaacatgtgctgtgtccactcagggttaaatagattaagggcggtgcaagatgtgctttgttaaacagatgcttgaaggcagcatgctcgttaagagtcatcacaactccctaatctcaagtacccagggacacaaacactggggaaggccgcagggtcctctgcctaggaaaaccagagacccttgttcacatgtttatctgctgaccttccctccactattgtcctatgaccctgccaaatccccctctccgagaacacccaagaatgatcaataaatactaaaaaaaataaaaataaaaataaaaaataaaaaaagatatttaactttagtaggtatttgtacatgcttattcttaatcctcacagttaccttagaggtagctatgagtatctctattttatagatgaggaatcggaagcttagagagagaagaaaacttgaccaagaatccatgatagtaggaagcatctgagttaggttcaaacccaggctttgctggccccaagaccctttataccaccacagtgtttcaccaaccacaactattagtatactaccttcatgatttctaccatatcttaaacaatactatccatgaaatcattgctctgatctgctagtgagtttttctaaatacattacaaatagatatacataactatcaaaattaaaaagtcatctatgtaccacctaaaattgtcttgcttatcacagaccagtggtgctggtacaacaatttaggaaacactgttgggctacatattgtagtcagggtttggattcttcctgtctcggccctgccactgattctctgtttccttaggcaaatccttttccctctctggactccagttgccccatatgtacaatgagatgcttgcagtcaaccacttagagacccttccaggtttatcttctgttctggatcagagataggaatgaaaagaatcagatgacagttgcacattggcaccaggatcgggacgtttcggccaatcagcttccctctcttgtgcagtggcaaagtccctgctttctgtcatctacatctatgtgcacatctatttctttgaaatagggcagtacatatgtgcatacatacatgtctctctgttgaggtggagacggggactatgtacatatatggttgggtggggacacctatgtttcacggaatttctcccacaatccctcatgtcctccagagtgcaacatgacttcagccctacaactatttatactcaaagagtagaaaacctacctgtgtaattattgctgttgctatttgtttttttccagcacaactccttttgaatccagtagctcggggagcaaaacatggccacagggtcatatccccttctcaatgggatgttatagttgtatgaaattgctgccattatttaaaaaaatatcacaaagggtcgtactttcggttccaggttatatgaatttcaattagttgttatgatcatctttctcctgctagcaagaactcccagtctctgctaagccatgagcaacagcagggaatttgtttatgtgatgaattgattaatttgatgaattaatgttatggtactgggaggacatttacactctgaaccacacaaccacttaccagttcaaaaacattttaggtacctccagaggcttgactgcagactcagcaatcaaactgaattacgaacaaaccagcattgacagacagcttgctaggtgccccctgtatcagcataaaccatggagcagagaagctcaggaaaggagcaaggaagagaaaaaccgcatttgggcatctactctaggtgataggttaagtaccaccatttataaatttactctcagaaaccctctcaaggagttattattactatactgcttttatagaaaataatctgaaaagtcacataatagtggcagagccagtatttctctccaggcccaactccaaatctatgtttttgccatgacagtatactgttattataagtgtccctgcccttcagctctaggaattggaaaataatctatgaaagacacacctagctttctaccaggtcctgttcatgttttacctccttcaagatgtctttcttgaccatcccagccaatagggttattctcctgcttataatctatgtagcattcactgcatctgtatccctttttcaggaaattgtataacagggtgggaagtgtccttggagactaatccaagcccttttttgtactgatgaggaaaagtggagccaaaagaggggaaaagggattgcccagggtcacatagcagattagattaataactgggactagatcattggccttctgattcttggtctagtacttttgttcctacatccaggttggggcaagagacgcagaagagagatgactagtaacctggtataggggaacaatcaaatctgatattcagaaaccaaatggaaaaatataatgtatgtaaaattgcacagcatgttcccaggtatataatagtttctcaatatgttttggttgtctgaatcaaagaacccacttctaccacctgctcagggtctacacagccagggattagagcaaccaaagcaatctgggactataatttagttctttagacagacagtctctactcttctcatttatctgttttcatgtatttatcatttatgtacttatttctttttttctttaatttttaacaaaatttcctttcacaatttcaacttcctattaatcctctacatttctgttcatgtcacttttctgataaaaatttaacaattcccaatcaacagggtgagaccaacttctcagtgtagcatcaaaactagatcccaaacttcctttctcttcttactctttatatcctgatgcctcttcccttggatacatgccctaacctgaagcaattacaaattactatcaatttgctatctcctttcattcacctgtctctttgcacatgatgtttgttccctcagtataccagcatgttgtatccctacttctgtgcttagcaagctcaatttaaaaaacccactgcgaatatcatattaagtgttaaatcttccccaactttcccagcgtaaattagctgcctcctcctaaatggcagttcatccatctttaagaagattgattatactgtattctaattgattagtgtgcatatctgttattccctcagtcccgctatcctttgctgtgaaatgtttgaaaaaataaatgaagtcttccttatctctctcttgttttatgtgctccctaaatgtttgtgactggtagcacaactcaagcagagaaagtacagaagcaaatgtataattgtttctccctaacttagagctgcttcctgcaccctcttcccattttaaccagggtattctgagccagggtgagaaagcagagttgcttccctatctctcctcctcctctttttaacaagaacaatacaagaggaaggagaggcgctaagctaacaggactcagtggggaggaagagttggggattcacctaccatgggtgagcccaccctagaggcatagcactctgcggctggtcgctggtgctcagggacagcccctgccgtccgccccgcagacaagaaagagactgcagcccggcagaagcctcagggcccctaggacctaaccaggaagcgctgctgggcgagggggtgatgccgtggcacattcggggctctgcgacagacgcatgcacgatgccgccaccactttctgtttccagaggctggtcctgagggaaggaggcaggcaaaaggcacataatataggcatgccgctctctggtttcagagtcactttttctacccaagttaggtcttggactccacaagaaaaacagttgatgtactacttcctcagtcatgggtattggaagcatcagaggattgggtctggctctgtgcatctgaattctgagaaatacctagaatctaaactggaggctggaatccaggtctcaggtaaaagggtctgaggagagggactatttatcttgaatccaagaagccacaggagaatgggtttctgtcttcagagttatgaagggatcaggtggagcagacctgaaagcaaattccagttcagtataatgtagaactttctaaaatcggagtcccctgaatgaagaacaggctgccttgaaagaaaatgaattctccaaacctggtgttgttcaagtaggagcagagtgattgacttgtgaagattcaaaataattgaacttagttgcccttggagcccagccttatggtgctcctaccatccatcaaggaaaattcaaactcttaacaccttttgtagttgaaggagggagtagtggacgcctctactgtattagcatcaacctctagaattttaagctccctacattttgttaatttctcctgctaacccaggagacaaagctacctcactttgatgcacaggcatagagtagcactcattaaatagatgataatatttgtgtgctcagcatgtgagacttccatactttatgcctagaaaggacttactacttttcaaactgagcttctcaactaccctgaaggaaatatgggggttaacactctcactctacagatgaagaaaataatgttaagagttgttaactttcctaaaatagctataaagcatatagctatttattctttataaaatgtccgattatgctcttctgcagtacagtgtcacccacaaccagatctgcctggcagacttcctcctcaacagtatttattgaccatctatcatataccaaacactgtagaatgcaatttacaggtccttccccttcacttcccagattttaattctggaaatcttcaagcttacagataagttgaaaaaatagcacacattctaaaaagaaagtgcaatgaatacttcttttccatccatctatctacacacacacacacacacacacgattgttgttaaaccatttaaagagttaattgcagacatcataaaatttcactcacggacacttcagcctgtatctccaaaacatgaatagtctcctatataatcacagtggtattatcaaactttaaaaagtaagtgttgattcaatgttaactaatatgcattctaccttctaatttcctcagttgtttaaaaaatttgctttttagatttactctttgttctctatctggaaacccattgatgtctataaattttgtgtcatgtctcttcagtccttttaaatctagaatgtccccacacacacccttttttgtttttcacaactgatatttttgaagactccaggacaactggcttacagaatgttgtaggtctcttttaatgtagaagataggccacattgcttccctgctttaaatgttccaattctttcccattgtgattagagtaaaatccaaactcctcacttataatgtggcttctgcttacctctccagtttcgtgttctatgactcttccctttacacgctatgctttaacaacattgtcctccttatgtctcttgaatatttcaaccttgctcctatctcagggccttagcagcctgctttttctatctgcagtgctttttgcccagaacctggtattgttggctcctttgcaccattcaggtctcagctcaaatattacttcctctggtagctagtcttcaaaggtgagactccccaaggaatcataccaccattattcacatccttatgtagtttatattcttgaatctgagctggtcctctaactcccttttaaccagtagaaagtggcagaagtaatgctgtaaagcttcagaggctaaatcagaagagcacttgtaacaagaacctgggaacagtgcctggcacagagtaggccttcattttctgttggactaatgagtttcctcattggtctcttgaaatgcttgtcctgaggaaagccaaccactttgtaacaagtgtgactaccctaagaacatcatgctatgaagaagcccatgctacccatgtagagaagtcacatgaagagagagatgtccagcgagtttccagagtatctagccatcccagtttaggttctcctagttcatctgtgggcccagcttaagcaccatccatgtgagtgaagaagccatcctgcgcattttattttcttcacagtacttatcaccatctaaaattgtcttgtttatcagattacaggtctattgtattgtctctttccactacaatgtaagctctgtgagaaagagaggccttggctgccttgttcactactgtatcccccgcacctaagcagtgcttctcagagtttattgtgcatacaaacaacctcaagctcttgtttaaatacagattctaattcagaaggtctggaatgcagcctgagattcagcatttcaaacagctcctagatgatgcagatgctgctagcctagaccacaaattgatagcacaacagtagaggtctctagataggagtgaaagaatttggtatctgtctgagtgaagcacatccccttctccatgatcttctgcatttccagcttctcttgaaaaaatcagaaggtctggcagtcctgggctggcattcacatactgcaacaatcagctggagctgggtgcaggtattagaggcacagcccctgcctaacgtatccttcctttcctgggcaggcattcaaatagtggcccctgctcttcagagttctctatcatttttttaccacttcacagattcaggagacaaaacccaaaatgtccatgccctcaaacaggtttttattttttctcttggaatggtcacattcatattcaataaatgtggcctgtctagaagagtgcttctcaaatgttaacgtcaattgattttcttgttaaaatgtagattctaagtatactaagactccacatttcccataagctcccaggtgatgccaatgttgctagtacatagaacacactttgaggaacaaatatctagaagagtgcctggcacagagaagacactcaatatttgttgggctaataaatttatttcatataacaaccttgttatggtggcattatctcaattttatagacaagaaaacagactcagagaattaagtgacttgcctaaggtcacataattgatatataacagagtctaccctcaaacttaagtccatctgatgacaaagctaacctattataccctaaaatctcagcttggtttaacacttgggtggccttatatataggtgtagtatgatttcaaagacagcaatagacactcaccatcttaagcccctcccacctgcctggaattccttatacaggctacaaaacctttcttttatatatatactttaacttctagggtacttgtgcacaacgtgcaggtttgttacatacgtgtacatgtgccatgttggtgtgctgcactcattaactcgtcatttacattaggtgtatctcctaatgctatcactcccctctcccccaccccacaacaggccccggtgtgtgatattccccaccctatgtccaagtgttctcattgttcgattcccacctatgagtgagaacccatggtgtttggatttttgtccttgtgatagtttgctgagaatggtggtttgcagcttcatccatgtccctacaaaggacatgaactcatccttttttatggctgcatagtattccatggtgtatatgtgccacattttcttcatccagtctatcattgatggacatttgggttggctccaagtctttgctattgtgaatagtgcctcaataaacatacgtgtgcatgtgtctttatagcagcatgatttataatccttagggtatatagccagtaatgggatagctgggtcaaatggtatttctagttctagatccttgaggaatcgccacactgtcttccacaatggttgaactagtttacagtcccaccaacagtgtaaaagtgttcctatttctccacatcctctccagcacctgttgtttcctgactttttaatgattgccattctaactggtgtgagatggtatctcattctggttttgatttacatttctctgatggccagtgatgatgagcattttctcatgtgtctgttggctgcataaatgtctccttttgagaagtgtctgttcacatccttcgcccacatttgatggggttgtttgtttttttgtgtgaatttgttggagttcattgtagattctggatattaggcctttgtcagatgagtagattgcaaaaattttttcccattctgtaggttgcctgttcactctgatggtagtttcttttgctgtgcagaagctctttagtttaattagatcccatttgtcaattttggcttttgttgccattgcttttagtgttttagacatgaagtccttgcctatgcctatgtcctgaatggtattgcctaggttttcttctaggatttttatggttttaggtctaacatttaagttgctaatccatcttgaattaatttttgtataaggtgtaaggaagggatccagtttcagctttctacatatggctagccagttttcccagcaccatttattaaatagggaatcctttccccatttcttgtttttgtcaggtttgtcaacgatcaaatggttgtagatgtgtggtattatttctgagggctctgttccgttccattggtctatatctctgttttggtaccagtaccatgctgttttggttactgtagccttgtagtataatttgaagtcaggtagtgtgatgcctccagctttgttcttttggcttaggatagtcttggcaatgcaggctcttttttggttccttatgaactttaaagtagttttttccaattctgtgaagaaagtcattggtagcttgatggggatggcattgaatctataaattaccttgggcagtatggccattttcacgatattgattcttcctgtccatgagcatggaatgttattccatttgtttgtgtcctcttttaattcattgagcaatggtttgtagttctccttgaagaggtccttcacatcccctgtcagttggattcctagatattttattctctttgaagcaattgtgaatgggagttcactcatgatttggctctctgtttgtctgttattggtgtataagaatgcttgtgactttcgcacattgattttgtatcctgagactttgctgaagttgcttatcagcttaaggagattttgggataagacaatggggttttctaaatatacagtcatgtcatctgctaacagggacaatttgacttcctcttttcctaattgaataccctttatttctttctcctgcctgattgccctggccagaacttccaacactatgttgaataggagtggtgagaatgggcatccctgtcttgtgccagttttcaaagggaatgcttccagtttttgcccattcagtatgatattggctgtgggtttgtcataaatagctcttattattttgagatacatccatcaatacctagtttattgagagtttttagcatgaagtgttgttgaattttgtcaaaggccttttctgcatctattgagataatcatgtggtttttgtcgttggttctgtttatatgctggattacatttattgatttgcatatgttgaagcagccttgcatcccagggatgaagcccacttgatcatggtggttaagctctttgacgtgctgctggatttggtttgccagtattttattgaggatttttgcattgatgttcatcagggatattggtctaaaattctctttttttgttgtgtctctgccaggctttggtatcagggtgatgctggcctcataaaatgagttagggaggattccctctttttctattgattggaatagtttcagaaggtatggtaccagctcctccttgtacctctcgtagaatttggctttggatccatctggtcctggactttttttgattggtaggctactaattattgcctctatttcagagcctgttattggtttattcaggaattcaacttcttcctggtttagtcttgggagggtgtatgtgttcaagaatttatccatttcttctagattttctagtttatttgcatagaggtatttatagtattctctgatggtagtttgtatttctgtgggataggtggtgatctcccttttatcattttttattgcatctatttgattcttctctcttttcttctttattagtcttgctagcagtctatcaattttgtcgatcttttcaaaaaaccagctcctggattcattgattttttgaagggttttttgtgtctctatctctttcagttctgccctgatcttagttatttcttgccttctgctagcttttgaatgtgtttgctcttgcttctctagttcttttcattgtgatgttagggtgtcaattttagatctttcctgctttctcttatgggcatttcgtgctataaatttcttcctactcactgcttaaatgtgtcccagagattctggtatgttgtgtctttgttctcattggtttcaaagaacatctttatttctggcttcatttcattatctacccagtaactgggctgctgctggcctttgaatgcaaacatctggagaagttaagatcagacagtggaactaacacctgggagcaaatcaggatcccgagtagtcaggaaagatctaaaagattgggcagaggccagatgcagtggttcacacctgtaatcccagcactttgggaggccaaggtgggcagatcacctgaggtcaggaattcaagaacagcctggccaatatggtgaaactctgtctctacaaaaatacaaaaattagccgggcataatggcgggtgcctgtaattccagttatgagggaggctgaagtgggggaattgcttgtacccaggaagtggaggttgcagtgagtggagattgtgccattgaactccagcctgggcgacaaagcaagactctgtcttggaaaaaataaaaagattgggcacacatagaagtaatattcaaaatacttactgtcctgtatgatatagtttggctgtttccccacccaaatgttatcttgaattgtagctcccataattcccactgttgtgggaggcaagtggtgggaggtaattgaatcatggtggtgggtctttcctgtgctgttctcttgatagtgaataagtctcatgagatctgatgattttattaaggggagttcccctgcatattctcttttgcctgccaccatgtaagatgtgactttgctccaccttcaccttctgccataattgtgaggccttaccagccatgttgaacagtgagtccattaaacttctttttctttttaaattacccagtcttgggtatgtctttattagcagcatgagaacaggctagtacactgtataatactgctgcaatccatctgaagggatataggcctgtaatactggagcagagttctggaggtattacccctttagttgctggattccaggaaggtatgggagtagaaagtgagggactggaacaatggggggcacacaaggggcttagtgtagttactatttaccaactggtatggaagtatttcagtatttaggaactggcactgccatacaggtgtaaactgcctgaatattagccctgaacatcaggttaaagcaagtcaaaaaatcttcggagccaagtcctagataaaggtcagcagcaaaccccagacgttggactggcagctgattatagactcagaaataataaatgccatgtgaatgatatctatggcagcagaccccatcagtctgaggcaggacattaggaatatctggctagtaggtgtctgggcagacagaacctgataagctgaaatgcatccacatcaaggtgtaataagccagtcagataactcttaaagcagatgtcacctcttggcaaaataatagaggttgactgtctttggtagttctccagatgtggtctctggaccacttgtctcagaatcatctggtatgagtgtttaaaaataagtaatttgaaggcctcacttcaggcctattaagtcagaatttagaggagaagtatatatgcattttgtaacaggcattccaagagattctgatatgttctcaagtttaagacccatttgtctgaagtgtgtgtgaaggacaagaaagtaggtgctatatgagaatggctgtctactttgctcagagaggttgatgtcaggttacaaaagagcttatatggtcaggctgagaagggtggatgaatatgacataatagggatcatctgaaggtttatgataagagggaaagttaagaggtattggggaagacaattctggtggcagtgtagatggattaaataggagagatacttgagagagaaagataagttacgggattttagagtaaattgaagtgttttctacttgctacattttagcagtcatggcttggagcatctctatcatgttggtcaacccaggaaaccttctgctgaaaaggaatctagactgacaatacctggttctcactatttcctgtctacagaccccagtaatttggctcccatggctcctcttttttaagttgaagtcatattctgccttctacctggcacttggaagtgccagtcatgggcccaggcccgccctgtggtatagctagagatttagcaaccattcatcccataattgccaagatgttaaatttccataacttttggcttagtttgaataaacatttgttgactaaccactttgttgcagaaattatgctatgccttggaaaaacagagataattaaagtacaattttttttgagacagagcctcataaaggtagacatgtagaccaatggaacagaatagggggcccagcaataaatccacaaaaatacagtcaactgatctagccaaaatgtttgcagcctgtccagctgacaaggtctaatattcagagtctaagaggaatttaaataaatttacaagaaaaaaataaccctatttaagaatgggcaaaggacatgaacaggaacttctcaaaagacgacatttatgcaaccaaaaaacatacggaaagaagctcaacatcactgataattagagaaatgcaaatcaaaaccacaatgagataccatctcatgccagtcagaatggcaattgttaaaaagacaaaaacacaacagatgcttgtgaggctacagagagataggaacacttttactctgttggttggaatgtgaattagttcaaccattgtggaatacagtgtgacgattcctcaaagacctaaaaacaaaactgccatttgacccagcttctgtatcactctattgcagactctacccttttaattgccactccatgcggtgttcttctcctctttctgccttggttccttgttttttatgttgttttttcccacccaataacaggacaagggacattctgacactttcccaaggctcttaacatgaaatggttcctgttgaatattctagggggtcttccattttttcaataatccatgcccatcctcagctcccacatgcctcacacaccttttctctcatctctgcatcttaccctcttaccctctctctagaccagtggttcttgagcttggtcacacattagaatcatctagggagctttaacaaaaaccaatgtccaaggcatacgccagcccaataaggagggactctcgaagggtgtagtccaggaatccaaaatattaaaactccccaaattattctaacgttgagtcaagattgaaagccattgctctagatgactctccaatatagtatttcttggccttttttattgtttctaaattttttttccaaattatctcacccataaaatgttaatatcacgcatttaatatataactgtttatatactgtggccctttggaggtccacaaaccagggtaatagctaagattcctccatccccacaccaagagtaaatttgtaccctttgggggactatatcatcccaatttaaaattcatgctaacgacttgttaccttcacttagaatttgatagaaatgcagaatctcaggccccattcatgatctactgaatctgaacctactttttaacaagtatttagcatgcattttaaatttgagacacactgctttacaagtcttcttctcccccaacaaagctgttggacctatggctctgagtaaggtgattaggagcagtagcatttatggagacctagaacatcaggactgagatggaggttaaaagaatctagtgcaagcctctgtcccatgtttgaacctctcaaatgactacctgctaagtagtcatccagccactgatgggataactctgataatgagaatcgatcactccaggctgacctttccaagatcacttttagaatgggattctttgggttgagctgaaattattcttcccatgatatttacccttgtatcctgctttgcaccctgtcaccacccaaaatgtacctactcactctgccccatgattgctccaagctctgaaaacagaggccacagtcccctcagtcttcttttcttctaagataattcagccactcttcataggtcacatttcctcttctttctccagactgctcattctcttctggatatactttgaactgtttgagccacagttaatcatctggacctacagcttgtgtgggctgtgtcccaggtgcagactgatttaagagaaataaagtaagactgtcgcctctcttgtccaagatgctaaacttttattaatgccctcctaaatttaaattagctttattggcaaccatatcacactgttggcttatactgaattgactgtcaactaaaaccctgaaaagtttccacataagctgctttacagccacatctacagcagcctgttcttcagtcagtttttggtacctgagtgcaaatcttgacatcctctgcactgagcttcactttttttttaagagacagggtcttgctctgttgcccaggctggagttcagtgcacagtcacagctcactacagccttgaactcctgggctcaaatgatcctcctgccccagtctcccaagttgctagagctacaggttcatgccaccacgcccagctatttttttaatttttttgtcgagatggggtctgtgtatgttgcccaggctggtcttgaattcctggcctcaagcaatcctccctcctaggcctcccaaaatgttgggattgcaggtatgagccatgttgttaaacaatttaaaatatgttagtaatccaaaaagtacaaattaaagtgatatatcatctggagacagagattattaaattagtaaagaattcgtaagtgctaatacccagtgtttgggtgagtataggaaaacagatactgagtgggagtaaaaattaagtgtaacctttctgaatggcaatttggcaatatcatcaaaaaaaaatctaaatgtgcatccttcttacccaacaattttacttctaagaatttaccctaaggaaatattcagaatcattcaagaaatatatgtacacaaatgtttattgctgcatttcttatcattgaacaattgggaacaaccttaatactctacaaaagaggactggttcaataaaaataagtaaataatttgattaaaatatggccattaaaatcacacataaaacctttacagacattgaaaaatgtttaattgttaaataataaaagtaggtaactatatgtgtatatatatatatatatgtgtatgtgtatatatatgtatatatatgtatatatatgtgtatatatgtgtgtatatatgtggtatatatatgtgtatacataaatacacatacacatatatatatacacatatatatgtgtgtgtgtatatatatatttatatatacacaatttgatcccaatgtgtatacggaaacagttgcatataaatttctattaaagtgtattccccaacatggtttgttttgttttttgatttttcctatgagtacgtagtatatatgtggaatacctgaaatatttttatagaggcatacaaagtgtaataatcacatcagggtaaatgaagtatccatcacctcaagcatttataattaatttttgtgttacaaacatttcaattgtatgtttttagttatttttcaatgtacaataaattgttgttgactgtagtcatcctgttgtgctgtcaaatactagatatcatttattctatctaactacatttttgtatccattaattatccctaatccttcctccccactacccttcccagcttctggtagccatcattctacttgatatctccatgagttcaattgttttaatttttagctagtgttttttattttacattatgctcctgttactgatgataaaatgtcaaaaggattgtattacataagactgagctcaaactgacaatgaaatgctaattgaaaatccatttgttagagaactcacagaaaactgctagtgctatatgtaaacttgttgaaagttcaatgtgatatggcccatgagtaaccaacaagagtaattctaaagcaaatgttttcataatttaatttactcagagatttctctgacacctgagcaagaccaaaacaagaaggaaaacacaattcagataatactttagctactattcaggtgaaatgagacttaaacttccctcagactgggacataagtctccctaaaacatagaaatatgttctggaatatgactcattctagtcattcattaagaggaaatacaactaataatatatcaattattaaacactcactatgaactaggcaatatttcttgttttcttatttgtttctttgtttgtttgtttttgagacagagtcttgctctgtcatccaggctggagtacagtggcatgattatggctcattgtaggctcactctcctgaactcaagtgattctcctacttcaggctcccaagtatctgggactacaggtgcacaccaccacacccaactatttttttttttttttgtagagatggaggtctcactatgttgcccaggctagtagtcaatgctccttctacatatgttcattggctgatataatcttcccaatttgtttataatgtaggtatcatctttacttttgagataaagaaagtggaacatcaaaatattaagtatcttgatcacatctcacagctaatcagtatccaaggtgtaatatgaacccacactacctaactccagattatacactcaaatcaatttttacatgaattgaacttccctccaggcaagctgggggtagaatgggcattatgaatttggaaggaaagatggggaattttggaaggtgaaactaggagagcgttttaaagagagcagtgtgcagaagaggagaccagtgacaggctgcttgtgatcaacctgagaaattgagctgctctagactgaagaaaaagagctaggtcagtggaacttagtgaataatctgaattggcataatgttaaaataaaatgcaatttacagccagcaatttcttttctagggatttatcctaaggaaataatgtgagaaatgtgtgaaggtgtatatatgtccgtaccagaatgtccattgaaatgtgaattgaggttgcacagtagtgctagcagcttcgcggttcggtcctcggacccggcagccaccactggtgctgagctgctaggaagcccctatcggcgagctctttggagcttgaacccattgtcactcctccgactcaccggaaaaaacaaaaaatgggtgaagcagatcgcctaggaaagtttttcattggtgggcttaatacggaaacaaataagaaagctcttgaagcagtatttggcaaatatggacaaatagtggaagtacacttgatgaaagactgtgaaaccaacaaatcaagaggatttgcttttatcacctttgaaagaccagcagacgctaaggatgcagccagagacatgaatggaaagtcattagatggaaaagccatcaaggtggaacaagccaccaaaccgtcatttgaaagtggtagacgtggaccgcctccacctccaagaagtagaggccctccaagagttcttagaggtggaagaggaggaagtggaggaaccagggaacctccctcacggggaggacacatggatgactggtggatattccatgaattttaacatgagttcttccaggggaccactcccagtaaaaagaggaccaccaccaagaagtgggggtcttcctcctaagagatctgcaccttcaggaccagttcgcagtagcagtggaatgggaggaagagctcctgtatcacgtggaagagatagttaccgaggtccacctcgaagggaatcgctgccctcttgtagagagctccacctacacgagggcgcccccatcttatggtggaagcagtcgctatgatgattacagcagctcacgtgacggatatggtggaagtcgagacagttactcaagcagtcgaagtgatctctactcaagtggtcgtgatcaggttggcagacaagaaagagggcttcccccttctatggaaagggggtaccctcctccacgtgattcctacagcagttcaagccgtggaacaccaagaggtggtggccgtggaggaagccgatctgatagagggggaggcagaagcagatactagaaacaaacaaaactttgtaccaaaatcccagttcaaagaaacaaaaagtggaaactattctatcataactacccaagaactactaaaaggaaaaattgtgttaccttttttaaaattccctgttaagctcccctccataatttttatgttcttgtgaggaaaaaaagtaaaacatgtttaattttatttgacttttgcattgcttttcaacaagcaaatgttaaatgtgttaagacttatactagtgttgtaactttccaagtaaaagtatccctaaaggccacttcctatctgatttttcccagtaaatgaggcaggcaattctaagatcttccacaaaacatctagccatctaaaatggagagatgaatcattctacctacacaaacaagctagctattagagggtggttgggatatgctactcataagatttcagggtgtcttccaactgaaatctcaatgttcttagtatgaaaaacctgaaatcgcatgcctattcacccagtaaacccaaaaaagcaaatggataatgctggccattctgcctttctgacatttccttgggaatctgcaagaacctcccctttcccctcccccaataagaccatttaagtgtgtgctaaacaactaagaatactaaataaaatgtttggccaaaaccaacaaaaacaaaaaaaaaaaagaaaaaaatgtgaattgtgacagcaaaaagttgcgataagaaaactcaaatgcacatcagtaaggaatttgatttaaaattagatttttacctctgggatacagcaaaggcaatactaagaggaaagttcatagccctaaatgcctacatcaaaaaatctgaaagagcacaaagaggcattcgcacctcaaggaactagagaaacaagaacaaaccatacccaaacccagcagaagaaatgaaataagcaagatcaaatcataagtaagtaaacaagattgaaacaaaacaaaacaaaaagataaaggaaacaaaaaactggttctttgaataaataagtaaaactgataaactattagcaagattcaccaagaaaagaagagataaaaatccaaataacctctataagaaacaaaatggggctggccatgatggctgacacctgtaatcccagcactttgagtggctgaggcaggcggatcacaaagtcaggagtttgagagcagcctgaccaacatggtgaaaccccatctctactaaaaatatacaaattagtcgggtgtggtggcgagtatctgtaatgccagctacttaggaagcagaggcagaagaatagcttgaacccggaaggtggaggttgcagtgagccgagatcgcaccactgcactccagcctgggtgagagagcaagactctgtctcaaaaaaaaaaaaaaaaaaaaaaaatgaaacaaaacgggagatattacaactgacatcacagaaatacaaaagatcattcaaggcaactacgaacacttttatgcatataaactagaaaacctagaggagatgaataaattcctggaaagatacaaccttcctagcttaaatcaggaagaattacatacactgggtagaccaataacaagcagtgagattgaaatggtaataaaaaattacagccgggcgcagtggctcacacctgtaatcccagcactttgggaggccaaggcgggcggatcacgaggtcaggagatcgagactatcctgggctaacacagtgaaaccccgtctgtattaaaaaatacaaaaaattagctgggcatggtggcaggtacctgtagtctcagctacttgggaggctgaggcaggagaatggcatgaacctgggaggcagagcttgcagtgagtggagatagtgctactgcactccagcctgggtgacagagcgagactccctctcaaaataaataaataaataaataaataaataaataaataaataaccaacaaagagaagtccaggaccagacagattcacagcagaattctaccagacattcaaagaagaattggtaccaatgcttttgacaccatttcacaatatagagaaagaggaaaccctctgtaaatcattctatgaagccactaccaccctaatacccaaaccaggaaaggacataatcaaaaaagaaaactacagaccaatatccctgatgaacatagatgtaaaaagtccttaacaaaatattagctgacttaatgcaacaacatatcaaaaagataatccaccatgtttaagtgagtttcataccagggattcagggatggtttaacatacacaagtcaataaatgtgatacatcacataagaagaatccaaaacaaaaatcacaagatcatctcaatatatgcagaaaaagcattcaacaaaatccagcatcgctttatggttaaaaactctcaacaaaattagtataaaaggaacatacctcaatgcactaaaagtcatcaatgacaaacacaaagccaacataattctgaatgggaaaatgtggaaagcattccctctgagaagtggaacaacacaagaattcccactctcaccacccctcttctacatagtactggaagtcctagccagagctatcagacaagataaagaaataaagggcatccaaatcagtaaagaggaagtcaaactgttgctgtttgctgatgatatgattatttacctagaaaaccctagagacttttccagaaagctcctagaaatgataaaagaattccgcagagtttccggatgcaaaattaatgtacacaaatcagtagcttttttatgcactaacagtgaccaagcagagaatcaaataaagaactcaatcccttttacaatagctgcaaaacaaataaaatacttaggaatatacctaaccaaggaggtgaaagacgtctacaagaaaaactacaaaacactgctgaaagaaattatagatgacgcaaagaactgaaacacatcgcttgctcatgaatgggtaaaatcaatgttgtgcaaatgaccatacttagccaggtgtggtggttcacacctgtaatcccagcactttgggaggctaaggtggacagatcacttgagatcaggagcactcaagaccagcctggccaacatggtgaaatcctgtctctactaaaaatacaaaagttagctaggcatggtggtgtatgcctgtagtcccagctactggagaggctgaggcagaagaatcacttgaatctgggaggcggaggttgcagtaagccgagactgtgccactgcactgcattacagcctgggcaacaatccatctcaaaaaaaaaaggaaaaagaaaagaaagaaaaaagataaaaagaaaatgaccatacttccagaagcaatctacaaattgaacgcaattcccatcaaaataccaccatcattcttcacagaattagaaaaaaaattcctaaaattcatatagaacaaaaaaaagagctcacatagccaaagcaagactaagcaaataaagcaaatctggaggcatcacattacctgatttcaaactatactataagtccatagtcaccaaagcagcatggtacttgtataaaaataggcacatagacaaatggaacagaatagagaacccagaaataaacccaaatacttacaaccaactgatctttgacaaagcaaacaaaaacataaagtggagaaaggacacccttttcaacaaattgtgctggtttaattggcaagccacatataggagaatgaaactggatccccatctctcaccttatacaaaaatcaactcaagatggataaaggtcttaaaatctaagatctgaaactaaaaattctagaagataacattggaaaaacccttctagacattggcttaggcaaagatttcatgaccaagaacccaaaagcaaatgcagtgaaaacaaagataaatagctgagacttaattaaaccaaagaacttttgcacagcaaaaggaacagtcagcagagtaaacagaaaaaccacagcataggagaaaatcttcaaaatctatacatctgacaaaggactaatacccagaatctacaatgaactcaaacaaatcagcaagaagaaacaaacaatctcatcaaaaagtgggctaaggacatgaatagacaattctcaaaagaagatatacaaatgacacacaaacatatgaaaaaatgctcaacatcacttatgatcagagaaatgcaaatcaaaaccacagtgcaataccaccttactcctacaagaatggccataatcaaaaaatgaaaaaaaaattgtagatgttggcatagatgcggtgaacagggaacacttctacactgctggtgggaatgtaaactagtacaaccactgtggaaaacagtgttttccttaattaactaaaaataaaactactgtttgattcagcaatcccagcaaccggtatctacccaggagaaaagaagtcattatacaaaaaagatacttgcacacacatgtttatagcagcacaattcacaattgcaaaaacgtggaatcaacccaaatgcccatcaatcaatgaatggataaagaaactgtaatatatatgatatatatggaataactctcagccataggaaggaaagaatcaatggcatttgcagcgacctgggtgagattggagactattattctaagtgaagtaactcaagaacggaaaaccaaacattatatgttttcagttataagtgagagctaagctacgacgatgcaaagacaaaagaatgacacaatggactttggggactctgagggagtgggaaggagatgaggaataaaagactacaaatatgatgcagtgtgtactgctcgggtgatgggtgcaccaaaatatcacaaatcaccactaaagaacttacttatgtaaccaaacaccacctttccccaataacctatggaaataaaaatatgacagacattacaaatgttggtataaatctatatttagtgacataaaatgatgatagacttatttttcagttaaaaattgtatataacaggttaaggagatttacttccagcatgacagcatgaggagatccactgacttgaaataaacaaaactgatgaaaattatgagaaagcaaccatttaaaccctctgaaaatgaagtaacatctgttcaagaaaatctatgactatttggtaagaaaggcaataatttgtgatacttgaactaagactactccttcccttcctcctccgagcttaaccaggtaaagactccactcaaaactacggcaccccaaaacacaggacactctctcttacagctcttaataagagggttttctttctgggagaagcaggatgtcagcatttctcatccttaatctcaagtgagtgcagtcaagaagtaggggctcccttcttccacccagctccctctcatgggattgaggctctagctttcagttaacattctgataatattagggccctgattgcctttgtcctagctcatgaagtgagattttcatacccaagagacaatccgagaagaccttaggctgctgccacccaccaccattaagagctcagctactgaagaagaaatcagtgaatagctttccattgtctccaagcccagttccagatccctaaatcaaaggtttttcctggggagagatttaagctgtaaaataaatagctcttaatctcttttcaaaggaactgacataatttgcaaaaggttgtgaataaattcaagcttttgatcacttttaagaacagtggaggatatcaggaaagtgaatgaggatgagaatcaagacacaggctaaactttaggccacttagtttgcagaggagaacctgctaataagactgctgagcaggccaggtgcgtaatcccagcactctgggaggccaagacaggtgggtcaagaggtcaggagttcaagaccagcctggccaagatggtgaaatcccgtctctactaataatacaaaaattagcggggcgtggtggtgggtgcctgtaattccagctactcaggaggctgaggcagagaattgcttgaacccaggaggtggaggttgcagtgagccgagatcacaccactgccctccagcctgggtgacagagggagacttcataaaaaaaaaaaaatctaggaggaatgcttctggagtcagaacaagtatcaaacactaacctcagaaatctctctttcaaaacaacccaaaatttaactaatttgtagagcaatatatgtcccagagcaccactgaaagcaatagagaagtctttctgcaattaatagaatttaggagctgtgtggtcagggggagaaagagagccctaccaaaaccactgttattctaggatgactgtggaagtgcccaaagctgtgcctctatgaggagcgacatcaaatgcttaacactacgtgaggaagagagggatagacaacactaaagtaatccagtaagtcactaaacaagccaaaagcattaacaaactctagagggtggaccaccagtactcagagttactacaaaatattacttaaaacccacgtgtctagccttttggcttccctgggccacactggaagaagaaaaattgtctttgctaacatgaacactaatgattgctcatgagaaaaaggaaagtcagtgcataatttgtgtgatctacaccaccatagataagcaaaaaatccccgaattcaaagggctggacacccgtgaaaatgatctggctgaacacagtggctcacacctgtcatcccagcatatagtgagaccctatctctatctctaaaaataaaaataaaaatattctggtttttaacataaaattatgaggaatacaaagaagaaattataatctgtacactaaaaaagcaactgctaatgagaagaatcagatgttggatttatcagaatgactttaaagtagcaattataaacatgctcatagaactgaagaaaccatgattacagaagtaaaacaagatatgataatgtcatatcaaactgagaatatcagcagaaagacagaaatattttaagataacttgcatgttaatcatagcactatttgcaataacaaagatatgatatcattctgtgtccatcagtcaatgcttggattaaaaatgtggtatatctgcacaatcgaatactgttcagccataagaagaatgaactcatgtcttttgcagcagcatgcatagaagtggaagccattctcctgagtgaaataactgagatacagaaagacaaatacaatatgttcgcatttgaaagtaaaagctaaataaggagtacacatggatgtacagtgtgggataacagacaatggaaacttggaaaaatagaagtggggggcttggagtggataagaaattacttaatgttacaatgtacattattcaggtgatggataccctaaaagccctaacttcactactatgtaatccctccatgtaatgaaactatacttgcatcctgtaaatttatacaaaaaaaaagaagagcctaatgaaagcactgaagttgaaaagcaaaataattaaaatttaaaatccactggaggagacattgattgaactgccagaagaaggaataagtgaacttgaagatagagtgatagatatgcaagccaaagaacagagagaaaaaacaatagagaaaaatgaacactgtcagagtaatgtgggtcatcattaagtgcaccaacatatgtgtaatgtcagtatcagaagaagaaaaggggaagaagcagaaaaacatatgtgaagaaataatgtcttaaaacctcacaaggttatcaaaaaacagcatacacattcaggatgtttaatgaacttcaaataggataaacacaaagagatctacaaataaatacatcatcatagtaaaacttctgaaagtcaaattcaagaagaaaattctgaaagcaacaagagaaaaacagcttattatttagaagggaactctaatagtattaacagctgactcctcagaagaaactatggagatcaataaggcagtgggaaagcattgaaattattccgaaaaaaattctatccaccaggcattctatagccaaccaaactatcattcaaacattaatagaaatggaaactagaaaagcaaaaactagaaaaatttgttgctagcaaatctgccttatagaaaatagtaaaggaaatcttcaggatgaacaccagtaatcccatttggtaattcaaatccacacaaaaaaagaaagagcactggtaaaggaaattttgtaactacaaaagacagtgtaaatgcataggttttgtatttttttcttcatttgatttaaaaagcaattgtgtacgataatatgtatgtaatgtatttttgggcctttaacttatagaaatgtaatatatatgtattatatttgtcactaacagcacaaaggaggttggcaaaagtaaagctgtgctgggctaaagaaataattaccaatgataaaataataatcataacaatatgttaccgggtttgtagcattaattaatgtcatacatagaacaataatcccacaaaatgaggaaaagataatagagctatctataagtagcatttctgaattatgctagtataagtttgaagtggattctataagttaatatttatatggcataccctaaagcaacacttacaaattcttcaaaaacatatagcaaaaaaaaaaaatttaatttaaaatgctacattagaaaatatttagttgagttgtcttcactgcttcatgtcttctgttaaaggaggcccaggtgattctgtcacaggttctattgctctgtgatcagcaggtactcagagacacatagggggatgctggggcccttcagaagctggaaaacggtttcgctgtctctaagccacacctaatcacctgtctggagcaaagtaaagagacctggaatgtaacaatagagaagacagtagctgtacatccaggattcaagatggtcaactagaaacagccaggagaaacatctcccactgagagactgggatatcagaaagactggcacacttcaagcagatctttggagggaaggcattaagaatggatgcgggggaggatatagacactgggccaatgggagaagaagttgggaaccctgcagggggctgaggagtactgggactcattcttggctcccagagactcctaagaaaggggtgagttgaacaggcaaggagtggcccactctcactacacacctctggaatcctatcagcaggagacctcatgaccccagtggacacttgagctggtaaagaaagctgctttagagagtgtcagggcaagactccagactgtatgacatgatgatcatcccgaagacacatagtcatcaaattctccaaggttgaaatggaagaaaaaatgttaaaggcagctagagagaaggggcgggtcacctacaaaaacaataccattaggctaacagctgatctttcaacagaaactctagaaactggaaaagattgggggcccatatttatcattcctaaagaaaattaattcaaaccaataattttatatccagccaaattaagcttcataagtgaaaaagaaataagatactttccatacaagcaaatgctaaggaaattcattactatcagacctgccttacaagagacccttaagggagtgttaaacacacttcagtacatagaccattgacactacaaaacaactacaaaatcaagtctgcataataaccagctaacaacatgacagtatcaaatctgcaaatatcaatattaaccttgaatgtagatgagctaaatgcctcaattaaaagacactgagtagcaagttggatcaagaagcaaaacccaaatctatgctgtctttaagagatccatcacacatgtaatgacatccatatcttaaagtaaagggatagagaaaaattgaccaagcaaatgaaaaacagaaaaaagcaggggttgctattctaatttcagacaaaatagagttgaaaccaacaatgatccaaaaagacaaagacaggcattccataatggtaaagggttcaattcaacaagaagatctaactatcttaaatatgtatgcacctaacatagaagaagctaggttcataaaacaagttctaagaggcctgcaaagagacttagataaccacacaataataataggagacttcaacactccactgacattattagattatcattgaaatggaaaactgaaaaagatattctaaacttacactcaacacttgattaactggacctaacagacatatgacagaacactccacccaacaagaatagaatatacattcttctcctctgcacatgacaaacactctaaaatcaaccatacaattagccataaaacaattctcagcaaaatcaaaaacactcaaatcataccaaccacactctcagtcaacagtgcaataaaaattaaaatcaatactaagaagattgctcaaaatgatacaattacatgaaaattaaacaatctgcttctgaatgacttttgagtaaaaaatgaaattaactagaaaatcaagaaattctttgacatttggattttgcaccttgatccaacttgccacgtagtgtcttttaattgaggcaaattctttgaatgagaacaaagatgcaacataccagaatctctcaaacaaagataaagcagtgttaagaggaaaatgtatggcatgaaactcccacatcaaaaagttggaaagatctcaaattaacaacttaacatcactcctacaagaactagaaacacaagatcaaaccaaccccaaagttagcagaagacaagaagtaaccaaaatcagagcacaactgaatgaaattgaattgtgaaaaaccatacaaaagctcgacaaaccacaagttggttcttggaaggaataaataggattgatatgctgctagctagactaataaagaagaaaagggagaagatccgaataaacacaattagaaacgacaaagagggtattaccactgaccccacagaaatacaaaaaaacctcagagactagtatgaacacctctatgcacagaaactagacatcgtaaaagaaattgataaattcctgataacattcaccatttcaagattaaaccaccagctgtataaagaagacctggcaccattcctactccaaactgctccaaaaacttgaagaagaaggactcctccctaactcattctatgagtccagcatcatgctgacatcaaaacctggcagagacacaaccaaaaaggaaaacttcaggacagtacccttgatgaacatagatgcaaaaatcctgaacaaaatactggcaaaccaaatccagcatcacatcaaatggttaatacaccaggctttatccctggaatggttcaacatacacaaatcaataaatgtaattcattacataagagaactaaaaacaaagtctacataatcatctcaatggatgcagaaaagggttttgataaaattcaacatcccttcatgttaaaaatcctcaacaaactagacattgaaggaacaaacataccttgaaaaaattagagccttctatgacaaacccacagccaacatcatactgaatggaagcattctccttgataaccagaacaagacaaggattcctactgtcacaactcctgttcaacatagtactggaagttctagccagagcaattgggcaagagaaagaaataaaaggcatcaaaataggaagaaagatcatcgatattgtttggctgtgtcctcacccaaatctcatctcgaattgtagttcccataatccccatgtgttgtgggaggcacctggtgggaggtaatttaatgatgggggcggttactcccatgctgatcatgctgttcttgtgctaatgagtgacttctcttgaggtctgatggttttaatggggcttcccccttcacttggctctcatacctcttcctgccgccctgtgaagagggatgtgtttgcttccccttccgccatgactgtaagtttcctgagatctccccagccatgctgaactgtgagttaattaagcctcttttctttgtaaattactcagtctcaggtaagtctttattagcagcatgataatggactaatacaatagtcaaactatctctcttcacagatgatgtcattctgtatctagaaaacttgacagtctttgcccaaaagctccaagatctgataaacaactttagtaaagtttcagaatacaaaatcaatgtacaataatcagtagcatttctatacaccaacaacatccaggctgagtgccaaattaagaaaagtctctttcacaacagccacaaaaagaatgaaatagctaggtatacaactcaccagggaagggaaagatctcgagagccagaatgatgaaacactgttcaaagaaatcagagatgaccaaaacaaatagaaaaatactctgtgttcataaataagagaaatcagtattgttaaaatggtcatacttcccaaagcaattcaaatgtttaatgctgttcctatcaaactaccaattacattcttcacataattagaaaaaaaaatttaaatgtatgtaaagccaaaaaagagcctgaatagccaaaacaatcctaagaaaatagaacaaagctggaggcaccacattacctgacttcaatctatattacaaaactacagtagttaaaacagcatggtattggtacaaaaatagacacatagaccaatggaacagcatagagcgcccagaaataaagctgcacttctctaaccatctgatctttgacaaagtggacaaaaagaagcaatggggaaaggactccctattcaataaatggtgcagtgataactggctagctatatgaagaatattaaaactggacctcttccttatatcatatacacaaatcagctcaagatagattaaagacttaaatataaaacctaaaggtataaatgccctgaaagataacctaggagatactacttcagacataggacttggcaacgattttgtgatgaagacaccaaaagcaattgcaaaaaaataaaaataaaaataaaataaataaatgagacataattaaactaaagtttttctgcacagcaaaagaacctatcaacagaataaacagacaacctacagaatgggagaaaatattttcaaaccatgaattgaaaaagggtctaatatccataatctataaggaaattaaacaaattaacaagcaaaaaccaaacaactccattaaaaagcaagcaaaagacttgaacagggagttttcaaaaaaaaagacatacgtgcggctaacaggcatatggaaaaaatgctcaacatcactaatcattagagaaatgcaaatcaaaaccaaaatgaggtatcatctcacattagtcagaatggctattagtaaaaaggcaaaatataacatatgctggcaaggttttggagaaaagggactgcttatacactgctggtgggaatataaattagttctgccattgtggaaagcagtttggtgatttttcaaatggcttaaaatagatgtactatttaacttagcaatccaattattgggcatacacccaaaggaacatgaattgttctaccataaaaacacatgaatgtgtatgtgcatcacagcattattcacaatagcaaaaacatggagtcaacctaaagtcacatcaacagtagactggataaagaaaatgtggtacatatactccatggaatactacaaagccatgtaaaagaagtagattatgtcctttgcagcaacatgggtggagcaggaggccattatcttaaatgaaataacacaggagcagaaaagtaaatactgcctgttctcacttataagtggaagctaaacattgagtacatgtggacacaaagaagaaaacaacagacactggaccctacttgagggtggatggtgggaggagggtgaggatggaaaaataacctattgggtacagtgtttactatttgggtgtttggtacactagaagaccaaacccaccactattcaatatatccatgtaataaacctgaacatgtacccctgagtctatataaataaaaataaactttaagaaaaaaaagaaaatattcatttgatgtgaaagaaagcagcagaatgatagagaaaaaaaaaacatgagacatataaaaaccaaaacgtaaaaaagctgacataaattcaactgtatcaataacactaaatgtgagaggattaaataatccaatcaaaggcagagactaacatgctgcatataaaacaagatccaactatattctttctataggagacactctagattcaaagatacaaataaactaaaagcaaaagaatggaaacaaagatatatcatgaaaatagcaaccacaagaaagttgtagtggctataatgatgttggacaagatagactttaaaacaataaaagttactaaagacaaacagaaccattttataatgataaaagggttaatccaccaggaagataaaaaaaatacatcaagaagataaaacaatgcacctagtaacacaacaccaaaacacttgaaggaaaaattgatagacataaagggagaaagatacaatttaaccatacagtaatagttaaagattaactcacttttttttttttgagtcagagtctctctcagtcacccaggatggagtgcagtggcatgatctccacccattgcaacctctgcctcccaggttcaagcgattctcttgcccgcattcttgagtagctgggattacaggcacatgtgaccacgtccagctagtttttgtatttttagtagagatggggtttcaccatgttggccaagctggtctcaaacacctcacctcaagtgatccacccacctcagtctctcaaagtgctgggatcacaggcatgagccactgtgcccatcctcagtaactcactttcaataatgcatagatctagtcaaaaaaataaggaaatagagaacttgtacaacattatgaaccaactagacctaacagacgtctatagaacactatatcacaaaatgaagaatatacattattttcaagttttcatggaacattccacaagatagatcatatgctggaccataaagcagatctcaataaatttaaaaggatagacataatacaaagtatcttctctgaacaaactggaataacattagaaatcaatagcaggaaaaaattggggaaacacataaattaaacaacataataaataagtgaaaaaagaaatcaaaaagagaaaatccgataatatcttgagacaaatgaaaattaaggaagaacatactaaaatttatgtgatgcactctctctccctccctttctccacatgcacagaagagagggcaaatgaggacatggtgagaatctgctagccaggaagacagaccttaccaacaccaaacctgatggcactttgatcttggattttcaacctctagaattgtgagaaaataaatttctgttgtttaagatataagtctgtggtatgatgttatgtcagccctagcacactaatacacatatgttaataaggaaagaaaatctaaaatcaataacccaaacatcttctataagaaactggaacaagagatagaactacacctaaagcaagtagaaggaaggaaataataaagattagagaaaatattgatgaaatatagaatagaatcaataagtaatagagaaaatcaataaaatcaaaaactggttctttgaaaaaaaaattggcaaaactttacttagcctgaccaagaaaaaaagagagaaaatgcaaattacttaaatcagaaataaaagttgagacattattcataatgtttaaaataaaatgaggatactatggataattatacatcaacaaactacataaattatatgaaatagccaaatttctatttttaaagcaatcaaaattgacttaaggagaaatcccacgtttggacagacaaacaggtgaagaaattgaatcagtagtcaaagaccttccaataaaagagaattctaagaccagatggcttgtctggcaaattttattaaatatttaaagagtaattagtagcaatctttctcaaactctttcaggctagatgtggggtctcatgcctgtaatcccagcactttgggaggctgaggcaggtggatcacctgaagtcaggagtttgagaccagcctggacaacatggtgaaaccctgtctctactaacatggtgaaaccctatctctactgaaaaaacaaaaattagccacgagtggtcgcatgtgcctgtaatcccactactcaggaggctgaggcatgaaaatcacttgaacccaggaggggaagtttgcagtaagctgaggttgtgtcactgcactccagcctgggcaacagagtgagacttcatttcaaaaaaaaaaaaaaaaaactatttaaaaaacaacaaacaaacaaaagaaagtggaatagttgataatttattctgaggttagcattacattaataccaaaaacagataaagatcctacaaaaaactgtaaaccaatattctttatgaatattgatgtaaaaatttttaacaaactactaccaaactgaatacatcagcatcataaagaattaaatatcatcccagggatgaagcccacttgatcatggtggataagctttttgatgtgctgctggattcggtttgccagtattttattgaggatttttgcatcaatgttcatcaagcatattggtcttaaattctcttttttggttgtgtctctgccccgctttggtaccaggatgatgctggcctcataaaatgagttagggaggattccctctttttctattgattggaatagtttcagaaggaatggtaccagctcctccttgtatttttggtagaattcggctgtgaatccatctggtcctggactcttttttgttggtaagctattgattattgccacaatttcagagcctgttattagtctattcaaagattcaacttcttcctggtttagtcttgagagggtgtatgtgtcgaggaatttatccatttcttctagattttctagtttatttgtgtagaggtgtttgtagtattctctgatggtagtttgtatttctgtgggatcggtcgtgatatcccctttatcattttctattgtgtctatttgattcttctctcttttcttctttattagtcttgctagcagtctatcaattttgttgatc

SEQ ID NO: 256 - DNA, 1322 bp, Homo sapiens
ggcggcctgcattgcagcggggcactgggctgcaatgggcctaggccggagtttccaagccgccaggactctgctccccccgccggcctctatcgcctgcagggtccacgcggggcctgtccggcagcagagcactgggccttccgagcccggtgcgttccaaccgccgccgaaaccggtcatcgtggacaagcaccgccccgtggaaccggaacgcaggttcttgagtcctgaattcattcctcgaaggggaagaacagatcctctgaaatttcaaatagaaagaaaagatatgttagaaaggagaaaagtactccacattccagagttctatgttggaagtattcttcgtgttactacagctgacccatatgccagtggaaaaatcagccagtttctggggatttgcattcagagatcaggaagaggacttggagctactttcatccttaggaatgttatcgaaggacaaggtgtcgagatttgctttgaactttataatcctcgggtccaggagattcaggtggtcaaattagagaaacggctggatgatagcttgctatacttacgagatgcccttcctgaatatagcacttttgatgtgaatatgaagccagtagtacaagagcctaaccaaaaagttcctgttaatgagctgaaagtaaaaatgaagcctaagccctggtctaaacgctgggaacgtccaaattttaatattaaaggaatcagatttgatctttgtttaactgaacagcaaatgaaagaagctcagaagtggaatcagccatggcttgaatttgatatgatgagggaatatgatacttcaaaaattgaagctgcaatatggaaggaaattgaagcgtcgaaaaggtcttgattctgagaatgaatttggttagttgcagaagatacattggctctaagaggatatattttgagaccaatttaatttcatttataagaacatagtaattaagtgaactaagcattcattgttttattaatactttttttctaaaataaaacttgtacaccagtttattactctaaaaagagaattacacatgccaaatggaccaatgtccatttgcttattggaggcaaagctacaatagaagtcagagcatcaccagaatggtctttaatgagcatggaacctgagcaaagggaataggtgggatgaattttttttttaattgtgaaacaattcataagcacaatatgatttacagaataataaacattcatgtacccactatcaggttaagaaatagaacatttattaatatgtaggaatgttaagaaataaaacatttaataag

SEQ ID NO: 257 - DNA, 508 bp, Homo sapiens
gatcgccgccatcatgggtcgcatgcatgctcccgggaagggcctgtcccagtcggctttaccctatcgacgcagcgtccccacttggttgaagttgacatctgacgacgtgaaggagcagatttacaaactggccaagaagggccttactccttcacagatcggtgtaatcctgagagattcacatggtgttgcacaagtacgttttgtgacaggcaataaaattttaagaattcttaagtctaagggacttgctcctgatcttcctgaagatctctaccatttaattaagaaagcagttgctgttcgaaagcatcttgagaggaacagaaagataaggatgctaaattccgtctgattctaatagagagccggattcaccgtttggctcgatattataagaccaagcgagtcctccctcccaattggaaatatgaatcatctacagcctctgccctggtcgcataaatttgtctgtgtactcaagcaataaaatgattgtttaact

SEQ ID NO: 258 - DNA, 2530 bp, Homo sapiens
cggcggccctgtcctcaccgcggtccgcccgccgccgctaaatacccggatgcgccgcccaagcgccggacgcggagctgggaaaagggaggcagaggaggcggaggcagaggcagaggcagagcccggtgccgagaccaagcgacagaccggcggggctgggcctcgcaaagccggctcggcgagctctcccgacacccgagccggggaggaaaagcagcgactcctcgctcgcatccccgggagccgcactccagactggcccggtagtcaggggctcaggagcagatcccgaggcaggctttgctcagcctccgacgagggctggcccttggaaggcgccttcaacagccggaccagacaggccaccatgaccgagaattccacgtccgcccctgcggccaagcccaagcgggccaaggcctccaagaagtccacagaccaccccaagtattcagacatgatcgtggctgccatccaggccgagaagaaccgcgctggctcctcgcgccagtccattcagaagtatatcaagagccactacaaggtgggtgagaacgctgactcgcagatcaagttgtccatcaagcgcctggtcaccaccggtgtcctcaagcagaccaaaggggtgggggcctcggggtccttccggctagccaagagcgacgaacccaagaagtcagtggccttcaagaagaccaagaaggaaatcaagaaggtagccacgccaaagaaggcatccaagcccaagaaggctgcctccaaagccccaaccaagaaacccaaagccaccccggtcaagaaggccaagaagaagctggctgccacgcccaagaaagccaaaaaacccaagactgtcaaagccaagccggtcaaggcatccaagcccaaaaaggccaaaccagtgaaacccaaagcaaagtccagtgccaagagggccggcaagaagaagtgacaatgaagtcttttcttgcggacactccctcctgtctcctattttctgtaaataattttctccttttttctctcttgatgctcaccaccaccttttgcccccttctgttctgactttataagagacaggatttggattcttcagaaattacagaataattcatttttccttaaccagttgtgcaaggacagcaacaaccaatctaatgatgagaatgtacttatattttgttttgctattaacctacttacggggttagggacttgcggggggggcttgtgtgttttgttggcttgtttgccatgaaggtagatgtgggtggggagaagacacaaggcagtttgttctggctagatgagagggaacccaggaattgtgaggttagcaggaatatctttagggtgagtgagttttccttgagttgggcacccgttgtgagagtttcagaacctttggccagcaggagagaggtggtagggagcagccagccggcaaaggaaggaggtggaaaaaaaccgccaccgggctgacttccacctcccagtggtgagcagtgggggcccaaacccagtttccttctcatttttgttagtttgccctttcggcctccctattttcttagggaaggggagtggggtccaagtgacagctggatgggagaagccatagtttctcccagtcagctagggtgtagccattgggggatctttgtggcttcagcaaattctcttgttaaaccggagtgaaaacttcaggggaagggtggggagtcagccaagtgcctcagtgtgccctgttgaaacttaggtttttccacgcaatcgatggattgtgtcctaggaagacttttcttttcttttcttttcctctggatttttgttcctcctgtacaagaggtgtctttgcttggtttggtggggctgcggccacttaaaacctcccgatctctttttgagtcctttattataagtagttgtagctgcgggagggggagggggagtgggcgggcagtggatagtaagacttactgcagtcgatttgggatttgctaagtagttttacagagctagatctgtgtgcatgtgtgtgtttgtgtatatatacatatctagggctagtacttagtttcacacccgggagctgggagaaaaaacctgtacagttgtctttctcttatttttaataaaatagaaaaatcgcgcacttgcgcgtccccccccccccacccccttttttaaacaagtgttacttgtgccgggaaaattttgctgtctttgtaattttaaaactttaaaataaattggaaaagggagaaactgagcggtgtatttttcctcactttgaagactggagaatgaatgcggagcggttaggcgggcaggcagtggggacatctggggcgtttgcacctgagaatggcgggggagggttcaggagctggacagaagccgagaatccttagtcccggaggctgcggaacgtgccttagccggcttctaggcttctgccttccggggtccagagggtaccccatttccggccgagaggtgagtacgtgggaatgcggtggggagt

SEQ ID NO: 259 - DNA, 374 bp, Homo sapiens
atgtctggccgtggtaaaggtggaaaaggtttgggtaagggaggagctaagcgtcatcgcaaggttttgcgcgataacatccagggcatcactaagccagctatccggcgccttgctcgtcgcggcggtgtcaagcgaatttctggccttatctatgaggagactcgtggtgttctgaaggtgttcctggagaacgtgattcgtgacgctgtcacttacacagagcacgccaaacgcaagaccgtgacagcaatggatgtggtctacgcgctgaagcgacagggacgcactctttacggcttcggtggctaaggctcctgcttgctgcactcttattttcattttcaaccaaaggcccttttcagggccgccca

SEQ ID NO: 260 - DNA, 1236 bp, Homo sapiens
acttggccttacactccgctcggctcaccatgtgtcactctcgcagctgccacccgaccatgaccatcctgcaggccccgaccccggccccctccaccatcccgggaccccggcggggctccggtcctgagatcttcaccttcgaccctctcccggagcccgcagcggcccctgccgggcgccccagcgcctctcgcgggcaccgaaagcgcagccgcagggttctctaccctcgagtggtccggcgccagctgccagtcgaggaaccgaacccagccaaaaggcttctctttctgctgctcaccatcgtcttctgccagatcctgatggctgaagagggtgtgccggcgcccctgcctccagaggacgcccctaacgccgcatccctggcgcccacccctgtgtcccccgtcctcgagccctttaatctgacttcggagccctcggactacgctctggacctcagcactttcctccagcaacacccggccgccttctaactgtgactccccgcactccccaaaaagaatccgaaaaaccacaaagaaacaccaggcgtacctggtgcgcgagagcgtatccccaactgggacttccgaggcaacttgaactcagaacactacagcggagacgccacccggtgcttgaggcgggaccgaggcgcacagagaccgaggcgcatagagaccgaggcacagcccagctggggctaggcccggtgggaaggagagcgtcgttaatttatttcttattgctcctaattaatatttatatgtatttatgtacgtcctcctaggtgatggagatgtgtacgtaatatttattttaacttatgcaagggtgtgagatgttccccctgctgtaaatgcaggtctcttggtatttattgagctttgtgggactggtggaagcaggacacctggaactgcggcaaagtaggagaagaaatggggaggactcgggtgggggaggacgtcccggctgggatgaagtctggtggtgggtcgtaagtttaggaggtgactgcatcctccagcatctcaactccgtctgtctactgtgtgagacttcggcggaccattaggaatgagatccgtgagatccttccatcttcttgaagtcgcctttagggtggctacgaggtagaggggtgggggttggtgggctgtcacggagcgactgtcgagatcgcctagtatgttctgtgaacacaaataaaattgatttactgtctgc

SEQ ID NO: 261 - DNA, 1407 bp, Homo sapiens
atggcggcggaaggctggatttggcgttggggctggggccggcggtgcctgggaaggcctgggcttctcggccccggccctggccccactacacctctctttcttcttttgttgttggggtctgtgactgcggatataactgacggcaacagtgaacatctcaagcgggagcattcgctcattaagccctaccaaggggtcggttccagctctatgcccctctgggacttccagggcagcactatgctcacgagccagtacgtacgtctgacccctgacgagcgcagcaaagagggctctatctggaaccaccagccgtgcttcctcaaagactgggaaatgcacgtccacttcaaagtccacggcacagggaagaagaacctccatggagacggcatcgccttgtggtacacccgggaccgcctcgtgccagggcctgtgtttggaagcaaagataacttccacggcttagccatcttcctggacacctaccccaatgatgagaccactgagcgcgtgttcccgtacatctcggtgatggtgaacaatggctccctgtcctacgaccacagcaaggatgggcgctggaccgagctggcgggctgcacggctgacttccgcaaccgcgatcacgacaccttcctggctgtgcgctactcccggggccgtctgacggtgatgaccgacctggaggacaagaacgagtggaagaactgcattgacatcacgggagtgcgcctgcccaccggctactacttcggggcctccgccggcaccggcgacctgtctgacaatcatgacatcatctccatgaagctgttccagctgatggtggagcacacgcccgacgaggagagcatcgactggaccaagatcgagcccagcgtcaacttcctcaagtcgcccaaagacaacgtggacgaccccacggggaacttccgcagcgggcccctgacggggtggcgggtgttcctgctgctgctgtgcgctctcctgggcatcgttgtctgcgccgtggtgggggccgtggtgttccagaagcggcaggagcggaacaagcgcttctactgagtggcgcctccggcggggcctgtccctgggcccaggagccaatgtgaacttttttttttaccgggattataaaagaacaacaagatgaccttatttcttaactgtttcaaataaatgattaaagtattttcatacattttgcttcttgcccagcagggacaggtggcagagccgaggcttagggtctggcaccccccacagctggagacggaggctctcctggggctggtgtctcaggagcaggggtctgtgtctacagatgggctgtggcccctgcaggcagctgttgaacactggagggtcccccggaccacactggggtgggctcctgaggac

SEQ ID NO: 262 - DNA, 2573 bp, Homo sapiens
gaatcggccgatgtgaaccgaatgttgatgtaagaggcagggcactcggctgcggatgggtaacagggcgtgggctggcacacttacttgcaccagtgcccagagagggggtgcaggctgaggagctgcccagagcaccgctcacactcccagagtacctgaagtcggcatttcaatgacaggtgacaagggtccccaaaggctaagcgggtccagctatggttccatctccagcccgaccagcccgaccagcccagggccacggcaagcacctcccagagagacctacctgagtgagaagatccccatcccagacacaaaaccgggcaccttcagcctgcggaagctatgggccttcacggggcctggcttcctcatgagcattgctttcctggacccaggaaacatcgagtcagatcttcaggctggcgccgtggcgggattcaaacttctctgggtgctgctctgggccaccgtgttgggcttgctctgccagcgactggctgcacgtctgggcgtggtgacaggcaaggacttgggcgaggtctgccatctctactaccctaaggtgccccgcaccgtcctctggctgaccatcgagctagccattgtgggctccgacatgcaggaagtcatcggcacggccattgcattcaatctgctctcagctggacgaatcccactctggggtggcgtcctcatcaccatcgtggacaccttcttcttcctcttcctcgataactacgggctgcggaagctggaagctttttttggactccttataaccattatggccttgacctttggctatgagtatgtggtggcgcgtcctgagcagggagcgcttcttcggggcctgttcctgccctcgtgcccgggctgcggccaccccgagctgctgcaggcggtgggcattgttggcgccatcatcatgccccacaacatctacctgcactcggccctggtcaagtctcgagagatagaccgggcccgccgagcggacatcagagaagccaacatgtacttcctgattgaggccaccatcgccctgtccgtctcctttatcatcaacctctttgtcatggctgtctttgggcaggccttctaccagaaaaccaaccaggctgcgttcaacatctgtgccaacagcagcctccacgactacgccaagatcttccccatgaacaacgccaccgtggccgtggacatttaccaggggggcgtgatcctgggctgcctgttcggccccgcggccctctacatctgggccataggtctcctggcggctgggcagagctccaccatgacgggcacctacgcgggacagttcgtgatggagggcttcctgaggctgcggtggtcacgcttcgcccgtgtcctcctcacccgctcctgcgccatcctgcccaccgtgctcgtggctgtcttccgggacctgagggacttgtcgggcctcaatgatctgctcaacgtgctgcagagcctgctgctcccgttcgccgtgctgcccatcctcacgttcaccagcatgcccaccctcatgcaggagtttgccaatggcctgctgaacaaggtcgtcacctcttccatcatggtgctagtctgcgccatcaacctctacttcgtggtcagctatctgcccagcctgccccaccctgcctacttcggccttgcagccttgctggccgcagcctacctgggcctcagcacctacctggtctggacctgttgccttgcccacggagccacctttctggcccacagctcccaccaccacttcctgtatgggctccttgaagaggaccagaaaggggagacctctggctaggcccacaccagggcctggctgggagtggcatgtatgacgtgactggcctgctggatgtggagggggcgcgtgcaggcagcaggatggagtgggacagttcctgagaccagccaacctgggggctttagggacctgctgtttcctagcgcagccatgtgattaccctctgggtctcagtgtcctcatctgtaaaatggagacgccaccacccttgccatggaggttaagcactttaacacagtgtctggcacttgggacaaaaacaaacaaacaaacaaaaaacatttcaaaaggtatttattgagcacctgcaggcgtgacctgacagcccaagggtgggtggggtgagggcttgaggacttgggcgggacacaggctccaaactggagcttgaaatagtgtctgatgaatgttaaattatctatctatctatttatttatttatttgagacagggaaagggtctccctctgttgccaaggctggagtgcagtggcgcaatcttaactcattgcaacctccaccttctgggttcaagcgattctctttattcagccccgggagtggcgcgcgccaccacgcccagctaatttgtgtattttcagcagagacggggtttgccatgctggccaggctggtctcgaactgctggattcaagtgatccgcccatctccgtctcccaaagtgctgggaattacaggcgtgagccaccaaaacccggcctgattaaagttaaataaatacg

SEQ ID NO: 263 - DNA, 466 bp, Homo sapiens
accactgctggctttttgctgtagctccacattcctgtgcattgaggggttaacattaggctgggaagatgacaaaacttgaagagcatctggagggaattgtcaatatcttccaccaatactcagttcggaaggggcattttgacaccctctctaagggtgagctgaagcagctgcttacaaaggagcttgcaaacaccatcaagaatatcaaagataaagctgtcattgatgaaatattccaaggcctggatgctaatcaagatgaacaggtcgactttcaagaattcatatccctggtagccattgcgctgaaggctgcccattaccacacccacaaagagtaggtagctctctgaaggctttttacccagcaatgtcctcaatgagggtcttttctttccctcaccaaaacccagccttgcccgtggggagtaagagttaataaacacactcacgaaaagtt

SEQ ID NO: 264 - DNA, 466 bp, Homo sapiens; identical to SEQ ID NO: 263

SEQ ID NO: 265 - DNA, 744 bp, Homo sapiens
atggtggaccccgagcaactggtgcagaaagcccggctggccgagcaggcggagggctacgacgacatggccgcggccatgaagaacgtgacagagctgaatgagccactgtcgaatgaggaacgaaaccttctgtctgtggcctacaagaacgttgtgggggcacgccgctcttcctggagggtcatcagtagtattgagcagaagacatctgcagacggcaatgagaagattgagatggtccgtgcgtaccgggagaaggtagagaaggagttggaggctgtgtgccaggatgtgctgagcctggtggataactacctgtacaagaattgcagcgagacccagtacgagcgcaaagatttgtacctgaagatgaaaggggactactaccgctacctggctgaagtggccaccggagagaaaaggggcgacgtggtggagtcctccgagaaggcctacagcgaacgcgagatcagcaaagagcacatgcagcccacccaccccatccgattaggtctggctcttaactactccgtcttctactatgagatccagaacgccccagagcaagcgtgccacttggccaagaccgagttcgaggacgccatcgccgagcttgacaccctcaacgaggagtcctacaaggactccacgctcatcatgcagctcctccgcgacaacctcacgctctggacgagcgaccagcaggacgaccacgatggaggagaaggcaacaacaactaa

SEQ ID NO: 266 - DNA, 614 bp, Homo sapiens
tatagctccacggccagaagataccagcagctctgcctttactgaaatttcagctggagaaaggtccacagcacaatgaggcttttcacaggcattgttttctgctccttggtcatgggagtcaccagtgaaagctggcgttcgtttttcaaggaggctctccaaggggttggggacatgggcagagcctattgggacataatgatatccaatcaccaaaattcaaacagatatctctatgctcggggaaactatgatgctgcccaaagaggacctgggggtgtctgggctgctaaactcatcagccgttccagggtctatcttcagggattaatagactactatttatttggaaacagcagcactgtattggaggactcgaagtccaacgagaaagctgaggaatggggccggagtggcaaagaccccgaccgcttcagacctgacggcctgcctaagaaatactgagcttcctgctcctctgctctcagggaaactgggctgtgagccacacacttctccccccagacagggacacagggtcactgagctttgtgtccccaggaactggtatagggcacctagaggtgttcaataaatgtttgtcaaattga

SEQ ID NO: 267 - DNA, 614 bp, Homo sapiens; identical to SEQ ID NO: 266

SEQ ID NO: 268 - DNA, 2565 bp, Homo sapiens
acgcggggcgcgcggctccgtcggctaccgcgggcgggcgcaggcgacgggcacggcgggcgagcgggcggtatggcggcggcggggcccgcggcggggccgacggggcccgagcccatgccgagctacgcgcagctagtgcagcgcggctggggcagcgcgctggcggcggcgcggggctgcacggactgcggctgggggctggcgcgtcgcggcctggctgagcacgcgcacctggcgccgcccgagctgctgctgctggcgctcggcgcgctgggctggaccgcgctgcgctccgcggccactgcgcgcctctttcggcccctggcgaagcggtgctgcctccagcccagagatgccgccaagatgcccgagagcgcttggaagtttctcttctacctgggcagctggagctacagtgcctacctgctgtttggcaccgactaccccttcttccatgacccaccatctgtcttctacgactggacgccgggcatggcagtgccacgggacattgcagccgcctacctgctccagggaagcttctatggccactccatctacgctacgctatacatggacacctggcgcaaggactcggtggtcatgctgctccaccacgtggtcactctcatcctcatcgtctcctcctacgccttccggtaccacaatgtgggcatccttgtgctcttcctgcacgatatcagtgacgtgcagcttgagttcaccaagctcaacatttacttcaagtcccgcggcggctcctaccatcggctgcatgccttggcagcagacttgggctgcctcagcttcggcttcagctggttctggttccgcctctactggttcccgctcaaggtcctgtatgccaccagtcactgcagtctgcgcacggtgcctgacatccccttctacttcttcttcaatgcgctcctgctgctgctcacccttatgaacctctactggttcctgtacatcgtggcgtttgcagccaaggtgttgacaggccaggtgcacgagctgaaggacctgcgggagtatgacacagccgaggcccagagcctgaagcccagcaaagccgagaagccactgaggaacggcctggtgaaggacaagcgcttctgaacccctcggccccgcccccgtggacccggccccaccccgaataccccggccacgctccccgtccttggccgcccctccaccccctccaactctgctcctctagggccgccgccacctcccctgggaccccgccccctcatcctgcctccatttcccggccacgccccccaggacccctgcccctccggggacaccggccccgccctcagcccactggtcccgggccgccgcggaccctgcgcactctctggtcatcgcctgggaggaagatgccaccgccgcagcaaggtccctgcggccaccacctcctcctcctcctggccctgctgctgccctcgctgcccctgacccgcgcccccgtgcccccaggcccagccgccgccctgctccaggctctaggactgcgcgatgagccccagggtgcccccaggctccggccggttcccccggtcatgtggcgcctgtttcgacgccgggacccccaggagaccaggtctggctcgcggcggacgtccccaggggtcaccctgcaaccgtgccacgtggaggagctgggggtcgccggaaacatcgtgcgccacatcccggaccgcggtgcgcccacccgggcctcggagcctgtctcggccgcggggcattgccctgagtggacagtcgtcttcgacctgtcggctgtggaacccgctgagcgcccgagccgggcccgcctggagctgcgtttcgcggcggcggcggcggcagccccggagggcggctgggagctgagcgtggcgcaagcgggccagggcgcgggcgcggaccccgggccggtgctgctccgccagttggtgcccgccctggggccgccagtgcgcgcggagctgctgggcgccgcttgggctcgcaacgcctcatggccgcgcagcctccgcctggcgctggcgctacgcccccgggcccctgccgcctgcgcgcgcctggccgaggcctcgctgctgctggtgaccctcgacccgcgcctgtgccaccccctggcccggccgcggcgcgacgccgaacccgtgttgggcggcggccccgggggcgcttgtcgcgcgcggcggctgtacgtgagcttccgcgaggtgggctggcaccgctgggtcatcgcgccgcgcggcttcctggccaactactgccagggtcagtgcgcgctgcccgtcgcgctgtcggggtccggggggccgccggcgctcaaccacgctgtgctgcgcgcgctcatgcacgcggccgccccgggagccgccgacctgccctgctgcgtgcccgcgcgcctgtcgcccatctccgtgctcttctttgacaacagcgacaacgtggtgctgcggcagtatgaggacatggtggtggacgagtgcggctgccgctaacccggggcgggcagggacgcgggcccaacaataaatgccgcgtggtctgctc

SEQ ID NO: 269 - DNA, 4583 bp, Homo sapiens
ggacgcgtgggtcgacccacgcgtccggcgggcggcgcgcacactgctcgctgggccgcggctcccgggtgtcccaggcccggccggtgcgcagagcatggcgggtgcgggcccgaagcggcgcgcgctagcggcgccggcggccgaggagaaggaagaggcgcgggagaagatgctggccgccaagagcgcggacggctcggcgccggcaggcgagggcgagggcgtgaccctgcagcggaacatcacgctgctcaacggcgtggccatcatcgtggggaccattatcggctcgggcatcttcgtgacgcccacgggcgtgctcaaggaggcaggctcgccggggctggcgctggtggtgtgggccgcgtgcggcgtcttctccatcgtgggcgcgctctgctacgcggagctcggcaccaccatctccaaatcgggcggagactacgcctacatgctggaggtctacggctcgctgcccgccttcctcaagctctggatcgagctgctcatcatccggccttcatcgcagtacatcgtggccctggtcttcgccacctacctgctcaagccgctcttccccacctgcccggtgcccgaggaggcagccaagctcgtggcctgcctctgcgtgctgctgctcacggccgtgaactgctacagcgtgaaggccgccacccgggtccaggatgcctttgccgccgccaagctcctggccctggccctgatcatcctgctgggcttcgtccagatcgggaagggtgttgtgtccaatctagatcccaacttctcatttgaaggcaccaaactggatgtggggaacattgtgctggcattatacagcggcctctttgcctatggaggatggaattacttgaatttcgtcacagaggaaatgatcaacccctacagaaacctgcccctggccatcatcatctccctgcccatcgtgacgctggtgtacgtgctgaccaacctggcctacttcaccaccctgtccaccgagcagatgctgtcgtccgaggccgtggccgtggacttcgggaactatcacctgggcgtcatgtcctggatcatccccgtcttcgtgggcctgtcctgcttcggctccgtcaatgggtccctgttcacatcctccaggctcttcttcgtggggtcccgggaaggccacctgccctccatcctctccatgatccacccacagctcctcacccccgtgccgtccctcgtgttcacgtgtgtgatgacgctgctctacgccttctccaaggacatcttctccgtcatcaacttcttcagcttcttcaactggctctgcgtggccctggccatcatcggcatgatctggctgcgccacagaaagcctgagcttgagcggcccatcaaggtgaacctggccctgcctgtgttcttcatcctggcctgcctcttcctgatcgccgtctccttctggaagacacccgtggagtgtggcatcggcttcaccatcatcctcagcgggctgcccgtctacttcttcggggtctggtggaaaaacaagcccaagtggctcctccagggcatcttctccacgaccgtcctgtgtcagaagctcatgcaggtggtcccccaggagacatagccaggaggccgagtggctgccggaggagcatgcgcagaggccagttaaagtagatcacctcctcgaacccactccggttccccgcaacccacagctcagctgcccatcccagtccctcgccgtccctcccaggtcgggcagtggaggctgctgtgaaaactctggtacgaatctcatccctcaactgagggccagggacaggtgtgcctgtgctcctgcccaggagcagcttttggtctccttgggccctttttcccttccctcctttgtttacttatatatatatattttttaaacttaaattttgggtcaacttgacaccactaagatgattttttaaggagctgggggaaggcaggagccttcctttctcctgccccaagggcccagaccctgggcaaacagagctactgagacttggaacctcattgctaccacagacttgcactgaagccggacagctgcccagacacatgggcttgtgacattcgtgaaaaccaaccctgtgggcttatgtctctgccttagggtttgcagagtggaaactcagccgtagggtggcactgggagggggtgggggatctgggcaaggtgggtgattcctcccaggaggtgcttgaggccccgatggactcctgaccataatcctagccccgagacaccatcctgagccagggaacagccccagggttggggggtgccggcatctcccctagctcaccaggcctggcctctgggcagtgtggcctcttggctatttctgtgtccagttttggaggctgagttctggttcatgcagacaaagccctgtccttcagtcttctagaaacagagacaagaaaggcagacacaccgcggccaggcacccatgtgggcgcccaacctgggctccacacagcagtgtcccctgccccagaggtcgcagctaccctcagcctccaatgcattggcctctgtaccgcccggcagccccttctggccggtgctgggttcccactcccggcctaggcacctccccgctctccctgtcacgctcatgtcctgtcctggtcctgatgcccgttgtctaggagacagagccaagcactgctcacgtctctgccgcctgcgtttggaggcccctgggctctcacccagtccccacccgcctgcagagagggaactagggcaccccttgtttctgttgttcccgtgaatttttttcgctatgggaggcagccgaggcctggccaatgcggcccactttcctgagctgtcgctgcctccatggcagcagccaaggacccccagaacaagaagacccccccgcaggatccctcctgagctcggggggctctgccttctcaggccccgggcttcccttctccccagccagaggtggagccaagtggtccagcgtcactccagtgctcagctgtggctggaggagctggcctgtggcacagccctgagtgtcccaagccgggagccaacgaagccggacacggcttcactgaccagcggctgctcaagccgcaagctctcagcaagtgcccagtggagcctgccgcccccacctgggcaccgggaccccctcaccatccagtgggcccggagaaacctgatgaacagtttggggactcaggaccagatgtccgtctctcttgcttgaggaatgaagacctttattcacccctgccccgttgcttcccgctgcacatggacagacttcacagcgtctgctcataggacctgcatccttcctggggacgaattccactcgtccaagggacagcccacggtctggaggccgaggaccaccagcaggcaggtggactgactgtgttgggcaagacctcttccctctgggcctgttctcttggctgcaaataaggacagcagctggtgccccacctgcctggtgcattgctgtgtgaatccaggaggcagtggacatcgtaggcagccacggccccgggtccaggagaagtgctccctggaggcacgcaccactgcttcccactggggccggcggggcccacgcacgacgtcagcctcttaccttcccgcctcggctaggggtcctcgggatgccgttctgttccaacctcctgctctgggaggtggacatgcctcaaggatacagggagccggcggcctctcgacggcacgcacttgcctgttggctgctgcggctgtgggcgagcatgggggctgccagcgtctgttgtggaaagtagctgctagtgaaatggctggggccgctggggtccgtcttcacactgcgcaggtctcttctgggcgtctgagctggggtgggagctcctccgcagaaggttggtggggggtccagtctgtgatccttggtgctgtgtgccccactccagcctggggaccccacttcagaaggtaggggccgtgtcccgcggtgctgactgaggcctgcttccccctccccctcctgctgtgctggaattccacagggaccagggccaccgcaggggactgtctcagaagacttgatttttccgtccctttttctccacactccactgacaaacgtccccagcggtttccacttgtgggcttcaggtgttttcaagcacaacccaccacaacaagcaagtgcattttcagtcgttgtgcttttttgttttgtgctaacgtcttactaatttaaagatgctgtcggcaccatgtttatttatttccagtggtcatgctcagccttgctgctctgcgtggcgcaggtgccatgcctgctccctgtctgtgtcccagccacgcagggccatccactgtgacgtcggccgaccaggctggacaccctctgccgagtaatgacgtgtgtggctgggaccttctttattctgtgttaatggctaacctgttacactgggctgggttgggtagggtgttctggcttttttgtggggtttttatttttaaagaaacactcaatcatcctaaaaaaaaaaaaaaa

SEQ ID NO: 270 - DNA, 1204 bp, Homo sapiens
cggaacgagggcaacctgcacagccatgcccgggcaagaactcaggacggtgaatggctctcagatgctcctggtgttgctggtgctctcgtggctgccgcatgggggcgccctgtctctggccgaggcgagccgcgcaagtttcccgggaccctcagagttgcactccgaagactccagattccgagagttgcggaaacgctacgaggacctgctaaccaggctgcgggccaaccagagctgggaagattcgaacaccgacctcgtcccggcccctgcagtccggatactcacgccagaagtgcggctgggatccggcggccacctgcacctgcgtatctctcgggccgcccttcccgaggggctccccgaggcctcccgccttcaccgggctctgttccggctgtccccgacggcgtcaaggtcgtgggacgtgacacgaccgctgcggcgtcagctcagccttgcaagaccccaagcgcccgcgctgcacctgcgactgtcgccgccgccgtcgcagtcggaccaactgctggcagaatcttcgtccgcacggccccagctggagttgcacttgcggccgcaagccgccagggggcgccgcagagcgcgtgcgcgcaacggggacgactgtccgctcgggcccgggcgttgctgccgtctgcacacggtccgcgcgtcgctggaagacctgggctgggccgattgggtgctgtcgccacgggaggtgcaagtgaccatgtgcatcggcgcgtgcccgagccagttccgggcggcaaacatgcacgcgcagatcaagacgagcctgcaccgcctgaagcccgacacggagccagcgccctgctgcgtgcccgccagctacaatcccatggtgctcattcaaaagaccgacaccggggtgtcgctccagacctatgatgacttgttagccaaagactgccactgcatatgagcagtcctggtccttccactgtgcacctgcgcgggggaggcgacctcagttgtcctgccctgtggaatgggctcaaggttcctgagacacccgattcctgcccaaacagctgtatttatataagtctgttatttattattaatttattggggtgaccttcttggggactcgggggctggtctgatggaactgtgtatttatttaaaactctggtgataaaaataaagctgtctgaactgttaaaaaaaaaaa

SEQ ID NO: 271 - DNA, 1319 bp, Homo sapiens; identical to SEQ ID NO: 151

SEQ ID NO: 272 - DNA, 2541 bp, Homo sapiens
ctgcagggaggcaggtagaaaaggcttttgggttttcaggtggggggcagtctagcctgatcagaaaggaggaaaaggccagggcagatgtctgggtggagtgaagggaaaaagtgatcccagaagaaggattagcccctgaaagtccctgaagtaggagaagggtaaaggtgtggttggtgaaggaaagcaggttttcccagattagcaaccagtcagggggaggaaggtgagagtgggagagtcataagtaaattattctgaatgtgtgtagtttaatggaattgggaaaaagatgggggaaatggatggaaggtcttggactctgagacaaggggtctataatcagtccatttcattatttctagcttccaccttcaccaaggcagacaaggagggcccacctcagctcctctgctccccctccctttcccacctattcatgtgtgcaagagtgccctgtcccacagaacacggggaacaaccatctcaatgacaaggacagcaggtggcaaggctcaacaggactcagatgtccccccagggttaactcatgaaaccctccatgaagcctgctgctcacccctccctcaaggcaagccctgcacctgggtctgaggatgagggtggcagtgaaaattaggccagtgacatcattttcagccagctagtgccaaaaaatatcaggtggtgttcatcaaataagccgagccaaccggtgatgaggatggtagtgtgagtcatgtgtgacaggtgaggaatgaaaacagagtgcccgagagcttctatttccttgaggcagggctcattcatcttataaaagccagctggccattgccttcacaccaaacccaagggaccacacagcccattctgctccgtataccaggtaagtctctgattgcaacaaactggcaattctagtgtactttttcattattagaaattagctaaaggcaaatatgtgtaagcaggttaatccagggtttcaatgggagatagagaatagtggaatatctttattttaagttaaattacagtctggatttgaaaggaccttagagatggttagggctcccacctcagtagatagtcattgaactgggagtcctggagaagattgttcaaatgcccatgggaagttcatagcagaactagaactcaggccagagcactctcagtaacactgcaatttccccctgacaagatatttatagaaattttaatttattagatggatctctactgagcatttattccatttaaggcagtatgctaggcactttggacaaatcaatgccctaacgtacttacttaacaaacataaaacctagcaggaaggtaatacatatatataaataaatgaaatgcaaagtagatagtaattggcatgacggagatgggcagagaagggctgtgcacttttgggagacttgctcaaggagacctctagggtgtcaagtgatgtgagctatgatggaggggtatttggacaagcagagatgggaagaaaagcatttggaagggactgtgtaagcacagaccagaagcaaaaccatagaggcttagatgaatataaagccatcctataagtcacaggctttctacatggtactaggagaggaaagtggtctgatgccattttccaaaagacctaatatgcggacctcatgtccctcagaagccagctttagtagggcatttttccagaacagatataaggtgccttgggtaggaagggagccaagaagagaactccaataaaatggagcagaagaaattgccttttagctcctcctcttcaaagggcctgaaaattatccaagcttatttcatttttaaatgtaatgggggagctaagggagatgaaaggctttctcttctaaagggtcctgaaataaaatctgtttggcattgaatttgtatccatctttctttaattgaatcactgtgtcagctttctgtctctagaaaaaaacacatttgaagcatgaattctcagcagcagaagcagccttgcaccccaccccctcagcctcagcagcagcaggtgaaacaaccttgccagcctccaccccaggaaccatgcatccccaaaaccaaggagccctgccaacccaaggtgcctgagccctgccaccccaaagtgcctgagccctgccagcccaagattccagagccctgccagcccaaggtgcctgagccctgcccttcaacggtcactccagcaccagcccagcagaagaccaagcagaagtaatgtggtccacagccatgcccttgaggagctggccactggatactgaacaccctactccattctgcttatgaatcccatttgcctattgaccctgcagttagcatgctgtcaccctgaatcataatcgctcctttgcacctctaaaaagatgtcccttaccctcattctggaggctcctgagcctctgcgtaaggctgaacgtctcactgactgagctagtcttcttgttgctcgggtgcatttgaggatggatttggggaaggtcaagtgaccatccctag

SEQ ID NO: 273 - DNA, 159 bp, Homo sapiens
ctgaagcccgacacggtgccagcgccctgctgcgtgcccgccagctacaatcccatggtgctcattcaaaaggccgacaccggggtgtcgctccagacctatgatgacttgttagccaaagactgccactgcatatgagcagtcctggtccttccactg

SEQ ID NO: 274 - DNA, 1411 bp, Homo sapiens
cgggaaacggcaaacagcgagatatccgagcgagagtcccgccctgcatcagtttgcggaaccgccttggtagaaggagagaaggggagtggaggaagcacgggactggagggaccaaagttccccgatggcggcccaggggtgcgcggcatcgcggctgctccagctgctgctgcagcttctgcttctactgttgctgctggcggcgggcggggcgcgcgcgcggtggcgcgcggagggcaccagcgcacacttgcgggacatcttcctgggccgctgcgccgagtaccgcgcactgctgagtcccgagcagcggaacaagaactgcacagccatctgggaagcctttaaagtggcgctggacaaggatccctgctccgtgctgccctcagactatgacctttttattaacttgtccaggcactctattcccagagataagtccctgttctgggaaaatagccacctccttgttaacagctttgcagacaacacccgtcgttttatgcccctgagcgatgttctgtatggcagggttgcagatttcttgagctggtgtcgacagaaaaatgactctggactcgattaccaatcctgccctacatcagaagactgtgaaaataatcctgtggattccttttggaaaagggcatccatccagtattccaaggatagttctggggtgatccacgtcatgctgaatggttcagagccaacaggagcctatcccatcaaaggtttttttgcagattatgaaattccaaacctccagaaggaaaaaattacacgaatcgagatctgggttatgcatgaaattgggggacccaatgtggaatcctgcggggaaggcagcatgaaagtcctggaaaagaggctgaaggacatggggttccagtacagctgtattaatgattaccgaccagtgaagctcttacagtgcgtggaccacagcacccatcctgactgtgccttaaagtcggcagcagccgctactcaaagaaaagccccaagtctttatacagaacaaagggcgggtcttatcattcccctctttctggtgctggcttcccggactcaactgtaactggaaactgtgttgctctaaccctcctccagccctgcagcctccccttgcagtcatcattcgtgttctgtgtataccaaatgattctgttatctaaagaagctttttgctgggaaaacgatgtcctgaaaatggtatttcaatgaggcatatgttcaggatttcagaaacaagaagttagttctatttagcaggttaaaaaatgctgcattagaattaaagcaagttattttcttatttgtataatgacacaaagcattgggagtcagactgcttgtatattatcaaacattttaagagaattctaataaagctgtattttacatc

SEQ ID NO: 275 - DNA, 1642 bp, Homo sapiens
ccagatctcagaggagcctggctaagcaaaaccctgcagaacggctgcctaatttacagcaaccatgagtacaaatggtgatgatcatcaggtcaaggatagtctggagcaattgagatgtcactttacatgggagttatccattgatgacgatgaaatgcctgatttagaaaacagagtcttggatcagattgaattcctagacaccaaatacagtgtgggaatacacaacctactagcctatgtgaaacacctgaaaggccagaatgaggaagccctgaagagcttaaaagaagctgaaaacttaatgcaggaagaacatgacaaccaagcaaatgtgaggagtctggtgacctggggcaactttgcctggatgtattaccacatgggcagactggcagaagcccagacttacctggacaaggtggagaacatttgcaagaagctttcaaatcccttccgctatagaatggagtgtccagaaatagactgtgaggaaggatgggccttgctgaagtgtggaggaaagaattatgaacgggccaaggcctgctttgaaaaggtgcttgaagtggaccctgaaaaccctgaatccagcgctgggtatgcgatctctgcctatcgcctggatggctttaaattagccacaaaaaatcacaagccattttctttgcttcccctaaggcaggctgtccgcttaaatccagacaatggatatattaaggttctccttgccctgaagcttcaggatgaaggacaggaagctgaaggagaaaagtacattgaagaagctctagccaacatgtcctcacagacctatgtctttcgatatgcagccaagttttaccgaagaaaaggctctgtggataaagctcttgagttattaaaaaaggccttgcaggaaacacccacttctgtcttactgcatcaccagatagggctttgctacaaggcacaaatgatccaaatcaaggaggctacaaaagggcagcctagagggcagaacagagaaaagctagacaaaatgataagatcagccatatttcattttgaatctgcagtggaaaaaaagcccacatttgaggtggctcatctagacctggcaagaatgtatatagaagcaggcaatcacagaaaagctgaagagaattttcaaaaattgttatgcatgaaaccagtggtagaagaaacaatgcaagacatacatttctactatggtcggtttcaggaatttcaaaagaaatctgacgtcaatgcaattatccattatttaaaagctataaaaatagaacaggcatcattaacaagggataaaagtatcaattctttgaagaaattggttttaaggaaacttcggagaaaggcattagatctggaaagcttgagcctccttgggttcgtctataaattggaaggaaatatgaatgaagccctggagtactatgagcgggccctgagactggctgctgactttgagaactctgtgagacaaggtccttaggcacccagatatcagccactttcacatttcatttcattttatgctaacatttactaatcatcttttctgcttactgttttcagaaacattataattcactgtaatgatgtaattcttgaataataaatctgacaaaatatt

SEQ ID NO: 276 - DNA, 2947 bp, Homo sapiens
ctcctcccgggcgggataattgaacggcgcggccctggcccagcgttggctgccgaggctcggccggagcgtggagcccgcgccgctgccccaggaccgcgcccgcgcctttgtccgccgccgcccaccgcccgtcgcccgccgcccatggagcgcgccgcgccgtcgcgccgggtcccgcttccgctgctgctgctcggcggccttgcgctgctggcggccggagtggacgcggatgtcctcctggaggcctgctgtgcggacggacaccggatggccactcatcagaaggactgctcgctgccatatgctacggaatccaaagaatgcaggatggtgcaggagcagtgctgccacagccagctggaggagctgcactgtgccacgggcatcagcctggccaacgagcaggaccgctgtgccacgccccacggtgacaacgccagcctggaggccacatttgtgaagaggtgctgccattgctgtctgctggggagggcggcccaggcccagggccagagctgcgagtacagcctcatggttggctaccagtgtggacaggtcttccgggcatgctgtgtcaagagccaggagaccggagatttggatgtcgggggcctccaagaaacggataagatcattgaggttgaggaggaacaagaggacccatatctgaatgaccgctgccgaggaggcgggccctgcaagcagcagtgccgagacacgggtgacgaggtggtctgctcctgcttcgtgggctaccagctgctgtctgatggtgtctcctgtgaagatgtcaatgaatgcatcacgggcagccacagctgccggcttggagaatcctgcatcaacacagtgggctctttccgctgccagcgggacagcagctgcgggactggctatgagctcacagaggacaatagctgcaaagatattgacgagtgtgagagtggtattcataactgcctccccgattttatctgtcagaatactctgggatccttccgctgccgacccaagctacagtgcaagagtggctttatacaagatgctctaggcaactgtattgatatcaatgagtgtttgagtatcagtgccccgtgccctatcgggcatacatgcatcaacacagagggctcctacacgtgccagaagaacgtgcccaactgtggccgtggctaccatctcaacgaggagggaacgcgctgtgttgatgtggacgagtgcgcgccacctgctgagccctgtgggaagggacatcgctgcgtgaactctcccggcagtttccgctgcgaatgcaagacgggttactattttgacggcatcagcaggatgtgtgtcgatgtcaacgagtgccagcgctaccccgggcgcctgtgtggccacaagtgcgagaacacgctgggctcctacctctgcagctgttccgtgggcttccggctctctgtggatggcaggtcatgtgaagacatcaatgagtgcagcagcagcccctgtagccaggagtgtgccaacgtctacggctcctaccagtgttactgccggcgaggctaccagctcagcgatgtggatggagtcacctgtgaagacatcgacgagtgcgccctgcccaccgggggccacatctgctcctaccgctgcatcaacatccctggaagcttccagtgcagctgcccctcgtctggctacaggctggcccccaatggccgcaactgccaagacattgatgagtgtgtgactggcatccacaactgctccatcaacgagacctgcttcaacatccagggcggcttccgctgcctggccttcgagtgccctgagaactaccgccgctccgcagccacgctccagcaggagaagacagacacggtccgctgcatcaagtcctgccgccccaacgatgtcacatgcgtgttcgaccccgtgcacaccatctcccacaccgtcatctcgctgcctaccttccgcgagttcacccgccctgaagagatcatcttcctccgggccatcacgccaccgcatcctgccagccaggctaacatcatcttcgacatcacggaagggaacctgcgggactcttttgacatcatcaagcgttacatggacggcatgaccgtgggtgtcgtgcgccaggtgcggcccatcgtgggcccatttcatgccgtcctgaagctggagatgaactatgtggtcgggggcgtggtctcccaccgaaatgttgtcaacgtccacatcttcgtctctgagtactggttctgagggctggtctgccgcacagccgcaggtgcacctccaggccaaatcattgctgccagtgactgtggtctgtacttgtttataccctcagacttttttaatgttaggtatttgtagcattaggccaacatgtattaagctgagccagatgaataagtccatctgatgtattttcggtgtttaaaaaatgagcccagttgctcaactgtttggttgaaaaccttgctcattttttaatgcgaaggctaagtgtcaccccctttctctgcctctggctgggccttgctaagggccaaggaaagaaagacattttttagggggcagccagtccaaatgccaaaagaagaccagttcttgccctgattgtatgaaatttgacattttggcactttttttttttttttggccaatcagattttctatgttctaaggacatggctgctgtagaatagcacagacgtggatgataaattatccccagaagcagcatgacagaatgcctcggggagcacttggaagggaaattgcagttctgttgaaatagaggaaaatcccttggtaaagacacagcctgttaggctcgtgtgggcctccagtatgttcaccaggggaatggctgggatttctcggcactctgcatcatccatcttttcttataggtgggaaaataaacaactttgtgatcctcctg

SEQ ID NO: 277 - DNA, 20575 bp, Homo sapiens
tttgctgctgaggaaatttatttggtagattgaaggtttgaacgagagctacagaaacgaaagaaaaagtctgtataagccaatggtgttcgggaagaaaataaccccattgccttgagtttgtaggtgccactactactctggaaaaatggcagatgacgaagactatgaggaggtggtggagtactacacagaagaagtggtttacgaagaggtgccgggagagacaataacaaaaatttatgagactacgacaacaaggacatctgactatgagcaatcagaaacttccaaaccagctctggcacagccagcactggcacagccagcatcagcaaagccggtggagaggaggaaggtcatccggaagaaagtggatccttcaaagttcatgaccccctacattgcacacagtcagaaaatgcaggatctttttagcccaaataaatacaaggagaagtttgagaaaacaaaaggacagccatacgccagcacaacagatactccagaacttcgcagaatcaaaaaagtacaagatcaactcagtgaggttaagtatcgaatggatggtgatgttgctaagactatatgtcacgtagatgaaaaagcaaaggatattgaacatgcaaagaaagtgtcgcagcaagtcagtaaggttttatacaagcagaactgggaagacaccaaggataagtacctgcttcctcctgatgcccctgaacttgtccaggccgttaagaacaccgccatgttcagcaagaaactgtacactgaagactgggaagcagacaaaagtttgttttacccctataatgatagcccggaactgaggagagttgcccaggcccagaaagctctcagtgatgttgcctacaaaaaaggtctcgctgaacagcaagctcaattcacgcctctggctgatcctccagatatagaatttgccaagaaagtaaccaatcaagtgagcaagcaaaaatacaaagaagactatgaaaataaaatcaaaggcaaatggagtgagacaccttgctttgaagttgcaaatgccagaatgaatgctgataacattagcacaaggaaataccaggaagattttgaaaacatgaaagaccagatctacttcatgcagaccgaaacaccagagtataaaatgaataaaaaagctggtgtggcagctagcaaggtaaaatacaaagaagactatgaaaagaataaaggaaaagcagattataatgtgcttcctgcttcagagaacccacagcttaggcagctgaaggcagcaggagatgccctaagtgacaaactatacaaggaaaactatgaaaagacaaaagcaaagagcataaattactgcgagacccccaaattcaagctcgatactgttctgcagaacttcagtagtgataaaaaatataaagattcctacttaaaagatattttgggacattatgtaggcagcttcgaggatccataccattcacactgcatgaaagtcacagctcaaaacagtgataaaaactacaaagcagaatacgaagaagacagaggcaaaggcttcttccctcagaccataactcaagaatatgaagcaattaagaaactagatcagtgtaaagaccacacctacaaagtccatccagataagacaaaattcacccaagttacagactctcctgttctgctacaagcccaagtcaattccaaacaactgagtgacttaaattacaaagcaaaacatgaaagtgaaaagttcaagtgccatatcccccctgatactcctgcttttatccagcacaaagtcaatgcctataacttgagtgataatctttataagcaagactgggagaagagcaaagccaaaaagtttgacattaaagtggatgccattcccctgctggcagccaaagccaacaccaagaacaccagcgatgtgatgtacaagaaagactatgaaaaaaacaaagggaaaatgattggagtcctcagcattaatgacgatcccaagatgctgcactccttgaaggtggccaaaaaccagagtgatagattatacaaggaaaactatgagaagacaaaggcaaagagtatgaattactgtgagaccccaaaatatcaacttgatactcagctgaagaacttcagtgaggctagatataaagacttatatgtaaaggatgttttgggacattatgtaggcagcatggaggacccatatcacacacactgcatgaaagttgcagctcaaaacagtgataaaagttacaaagcagaatatgaagaagataaaggaaaatgctatttccctcagacaataacacaagaatatgaagcaatcaagaagctggaccagtgtaaagatcatacctacaaagttcatccagataagaccaaattcacggcagtcactgattctcctgtactgttgcaagcccagctcaacacgaaacagcttagtgatctgaattacaaagcaaaacatgaaggtgagaagttcaagtgccatataccagcagatgctccacagtttatccaacacagagtcaatgcctataatctgagtgataatgtttataagcaagactgggagaagagcaaagccaagaagtttgacattaaagtggacgccattcccctgttggcagccaaagccaacaccaagaacaccagcgatgtgatgtacaagaaagactatgaaaagagcaaagggaaaatgattggagccctcagcattaatgacgatccaaagatgctgcactccttgaagacagccaaaaaccagagtgatcgcgaatatcgaaaagattatgaaaagtcaaaaactatctacacggcacctcttgatatgctccaagtcactcaagctaagaaatctcaggcaattgccagcgacgttgattataagcacatcttacacagttacagctacccccctgatagcatcaatgtggaccttgccaagaaggcatatgcgctgcagagcgatgttgaatacaaagctgactacaatagctggatgaaaggttgtggctgggtgccttttgggtccttagaaatggaaaaggcaaagcgagcttcagacatcctcaatgagaaaaaatatcgccaacatccagacaccctcaagtttacctcgattgaagatgctccaattacagtacagtctaaaattaaccaggcccagaggagtgatatcgcttacaaagccaaaggagaggaaattattcacaaatacaacctgccaccagacctgccccagttcatccaggctaaagttaatgcctacaatatcagtgagaatatgtacaaagcagacttgaaagacttgagcaagaagggatatgacctgagaactgatgcgattcccatcagagctgccaaagctgccaggcaggcggcgagtgacgttcagtacaaaaaagactatgaaaaggctaaagggaaaatggttggcttccaaagtcttcaagatgaccctaaactggttcattatatgaacgtggccaagatacaatcagatcgggagtataaaaaagactatgagaagacaaagtccaaatacaacacgccccatgatatgttcaatgtcgtggcggctaagaaagcccaggatgtggtcagcaatgtcaactataagcattctctccatcattacacctacttgcctgacgccatggacctggagctgtctaagaacatgatgcagatacagagtgataacgtctacaaggaagactacaacaactggatgaaaggcattggctggattcctattggcagtctcgacgtcgaaaaagttaaaaaggccggtgatgctctgaatgaaaagaagtacaggcaacatccagacaccctcaaatttaccagcattgtggactccccagttatggtccaggcaaaacagaacacgaagcaagtcagtgatatcttatacaaggctaaaggagaagatgtgaaacataaatacaccatgagtcctgatcttcctcagtttctccaggccaagtgcaatgcttacaatataagtgacgtctgttataaacgggattggtatgacttaatagccaagggcaacaatgtgctgggcgatgctattcccatcactgcagccaaggcatcgagaaacattgccagtgattataaatacaaggaagcttatgagaagtcaaagggaaagcatgtgggtttcagaagcctccaggatgatcccaagctggtccactatatgaatgtggcaaagctgcagtctgatcgtgaatacaagaagaactatgagaacaccaaaaccagctaccatacccctggggacatggttagcatcacagctgcaaagatggcccaggatgtcgctaccaatgtcaactacaaacagccattgcatcattacacatacctacctgacgccatgagtcttgagcatacgaggaatgtcaatcaaattcagagtgataatgtgtataaagacgagtataacagcttcttgaagggcatcggatggatccctattggttccctggaggtggagaaggtcaagaaagcaggcgatgcattaaatgagaggaagtatcgacagcacccagataccgtcaagttcacaagtgtgcctgattccatgggcatggtgttggctcagcataacacaaagcagctaagtgatttgaactacaaggtagagggagagaaactgaagcacaagtatactattgaccctgaattgcctcagtttattcaagccaaagtcaacgccctcaacatgagtgatgctcattataaagcagattggaagaaaaccattgccaagggctatgatttgagaccagatgccatcccaattgttgctgcaaaaagttcaaggaatattgctagtgattgcaaatataaggaggcctacgagaaagccaaaggcaagcaagttggatttctcagtcttcaggatgatcctaaactggttcactacatgaatgtggccaaaatccagtctgatcgtgagtacaaaaagggctatgaagccagcaagaccaagtaccacacacctctggatatggtcagtgtgacagctgcaaagaaatctcaggaggttgccaccaacgccaactacagacagtcataccaccactacactctcctgcccgatgccttgaatgtggagcactccaggaatgccatgcagattcagagtgataatctgtacaaatctgacttcaccaattggatgaaagggatcggctgggtgcccatagagtccctggaggtggagaaggcaaagaaagcaggagagattcttagtgagaagaagtatcgccagcaccccgagaagctgaagttcacttacgccatggacacaatggaacaggcacttaacaagagtaacaaactgaacatggacaagaggctctacactgaaaaatggaacaaggacaagaccaccattcatgtcatgcctgacacaccggatattttactctccagagtaaaccaaatcaccatgagtgataaactgtacaaagctggctgggaagaggaaaagaagaaaggatatgacctgaggcctgatgccattgcaataaaggctgcaagagcctctagagacattgccagtgattacaaatacaagaaagcctatgaacaagccaaagggaaacacattggcttccggagcctggaagatgaccccaagctggtgcacttcatgcaagtggccaagatgcagtcagaccgggaatacaagaagggatatgagaaatccaagacctccttccacaccccggtggacatgctcagtgtggtggcagccaagaagtctcaggaagtggccaccaatgccaactacaggaacgtgatccatacctacaacatgcttcctgatgccatgagctttgaattggccaaaaatatgatgcagattcaaagtgataatcagtacaaggctgactatgctgacttcatgaagggcattggatggctccctctgggctccctggaagcagagaaaaacaagaaagccatggagattattagtgaaaagaagtaccgccagcacccagacactttgaagtattccacactcatggactcgatgaacatggttttggcccagaataatgcaaaaattatgaacgaacatctctacaaacaagcatgggaggctgacaaaaccaaagtccacatcatgcctgatatcccccagattattttggcaaaggcaaatgcaattaatatgagtgataaactctacaaactttccttggaagagtctaaaaagaaaggctatgatctcagacctgatgcaattcctatcaaagctgccaaggcttccagagatattgcaagtgattataaatacaagtacaattatgaaaaagggaaggggaaaatggttggtttccgcagtctcgaggatgatcccaaattagtccattccatgcaagtggctaagatgcaatctgatcgggagtacaagaaaaactatgagaacacaaagaccagctaccacacccctgccgacatgctcagtgtcacggctgcaaaggatgcccaagccaacatcaccaacactaactacaagcacctgattcacaagtacatcctccttccagatgcaatgaacattgagctgaccaggaatatgaatcgcatacagagtgataatgaatataagcaagattacaatgaatggtacaaagggcttggctggagtccagcaggttctctggaagtggagaaggccaagaaagcaactgaatatgccagtgatcagaaataccgccagcacccgagcaacttccagtttaagaagctgactgattccatggacatggtgcttgccaagcagaatgcacataccatgaacaagcatttatacaccattgattggaataaagataagaccaagattcatgtgatgcctgatacaccagatattttacaagccaagcagaatcaaacactgtatagtcagaaactctataaacttggatgggaagaagctttgaagaaaggctatgatctcccagttgatgcaatttctgtacagctagctaaagcttcaagagacattgctagtgattataaatacaaacaaggctaccgaaagcaacttggccaccatgttggattccggagtctgcaagatgacccaaaacttgtgttgtccatgaatgtagccaaaatgcagagtgaaagagaatacaagaaggactttgagaagtggaaaactaagttctccagcccagtggacatgttgggagtggtactggccaagaagtgtcaggagttggttagtgacgtggactacaagaactacctgcatcagtggacatgtctgcctgatcagaacgatgttgtgcaagctaagaaagtttatgaactgcaaagtgagaatctatataaatctgaccttgagtggctgagaggcataggatggagtcccttgggttctttagaggcagaaaagaacaagcgggcttcggaaatcatcagtgagaagaaatatcgtcagcctccagacagaaacaagttcaccagcattcctgatgccatggatatagttctggcaaagacaaatgccaaaaataggagtgatagactttatagagaagcttgggacaaagacaagactcagatccacatcatgcctgatacacctgacattgttctggctaaagcaaacttaatcaacacaagtgataaactctaccgaatgggttatgaggagctgaagagaaaaggttacgatcttcctgttgatgccataccaatcaaagcagcaaaagcctcccgggaaattgccagtgaatacaagtacaaggaaggctttcgcaagcagctcggccaccacattggtgcccggaacattgaagatgaccccaagatgatgtggtccatgcatgtggccaagatccagagtgacagggagtacaagaaggactttgagaagtggaagaccaagttcagcagcccagtggacatgctgggggtggtgttggccaagaagtgccagaccttagtcagcgacgtggactacaagaactacctgcaccagtggacatgcctgcccgaccagagcgatgtcatccatgctcggcaggcctatgacctccagagcgataatttgtacaagtcagaccttcagtggctaaaaggcattggctggatgactagtggttctctcgaggatgagaaaaataaacgagccacccagattttgagtgaccatgtttaccgtcagcacccagatcaatttaagttttccagccttatggattccataccaatggttttggcaaaaaacaatgctattaccatgaatcatcgcctctatacagaagcttgggataaagataaaaccactgtccacattatgccagatacccctgaagttttattagctaaacaaaacaaagtaaattacagtgagaaattgtataagcttggcctagaagaagccaagaggaaaggttatgacatgcgggtagatgccattcctatcaaggcagccaaggcctccagagatattgcaagtgaagtaatacaaagaaggctatcgtaagcagctcggccaccacattggtgcccgagctatacgtgatgaccccaagatgatgtggtccatgcacgtggccaagatccagagtgacagggagtacaagaaggactttgagaagtggaagaccaagttcagcagcccagtggacatgctgggggtggtgctggccaagaagtgccagaccttagtcagcgatgtggactacaagaactacctgcaccagtggacatgcctgcccgaccagagcgacgtcatccatgctcggcaggcctatgacctccagagcgataatatgtacaagtctgatctccagtggatgagaggcattggctgggtgtccattggctctttggatgtggaaaaatgcaaaagggcaactgaaattttgagtgataaaatctatcgccagcctccagacagattcaaatttaccagtgtgactgactctctggaacaagtgttggccaaaaataatgctctcaacatgaataagcgtttatacacagaggcctgggacaaagacaagactcaaattcacataatgcctgatacaccagagattatgttggcaaggcagaacaaaatcaactacagtgagactctatacaaacttgccaatgaagaagcaaaaaagaaaggctacgacttgcgaagtgacgccatccccatcgtggctgccaaggcctccagggacgttatcagtgattacaaatacaaagatggttaccgcaagcagctcggccaccacattggagcccggaacattgaagatgaccccaagatgatgtggtccatgcatgtggccaagatccagagtgacagggagtataagaaggactttgagaagtggaagaccaagttcagcagcccagtggacatgctgggagtggtgttagccaagaagtgccagaccttagtcagcgatgtggactacaagaactacctgcacgagtggacgtgcctgcccgaccagaatgatgtcatccatgctcggcaggcctatgacctccagagcgataacatttacaaatctgatctccagtggctgagaggcattggctgggtccccattgggtctatggatgtggtcaagtgcaagagagctgctgaaatactgagtgataacatctaccgccagcctccggacaagctgaaatttaccagtgtgactgactctctagagcaggtgctggccaagaacaatgctctcaatatgaacaagcgcttatacacagaagcctgggacaaagacaagacccaagtccatattatgcctgatacacctgaaatcatgttggcaagacaaaataaaataaattatagtgagagcctctatcgtcaggccatggaagaagccaagaaagaaggctatgacttgagaagtgatgccattcccattgtggctgccaaggcctctcgggatattgccagtgattacaaatacaaagaagcatatcgtaaacagttgggtcaccacattggcgcccgagcagtacacgatgaccccaagataatgtggtccctccacattgccaaagtgcagagtgaccgtgagtacaagaaagattttgagaaatacaagacaaggtacagcagcccagtggacatgcttggtatcgttttggccaagaagtgtcagaccttggtcagcgatgtggactataaacatcctctgcatgaatggatctgcctgcccgaccagaatgacatcattcatgcacggaaagcctatgacctccagagtgacaatttgtataagtcagaccttgaatggatgaaaggcattggctgggttccgattgattccttggaagttgttagggccaagagagctggagaattacttagtgatactatctaccgtcagcgtccagaaacgctgaaatttaccagtataacggacactccggagcaggtgctggcaaaaaacaatgctttaaacatgaataagcgcttatatactgaagcctgggacaatgacaagaaaactattcatgtcatgcctgatacaccagaaatcatgttagccaaactcaaccgaataaactacagtgataaactctataaacttgctttggaagagtccaagaaggaaggctatgacttgcgtctggatgccattccaatccaagcagccaaggcttcaagagatattgctagtgattacaagtacaaggaaggctaccgcaaacagcttggccaccatattggggcccggaacattaaggatgacccgaagatgatgtggtccatccatgtggccaagatccagagtgacagggagtacaagaaggagtttgagaagtggaagaccaagttcagcagcccagtggacatgctgggggtggtgctggccaagaagtgtcagatccttgtaagcgacatagactacaagcatcccctgcatgaatggacctgcctgcctgatcagaatgacgtcattcaggctcggaaggcctatgacctgcagagtgatgctatttacaaatctgatcttgagtggctgagaggcataggatgggttcccattggctctgtagaggtcgagaaagtgaagagagctggagaaatcctgagtgacaggaagtatcgccagcctgcagaccagctcaaattcacatgcattaccgacactccggaaattgtcctagcaaagaataatgccctgacaatgagcaagcatttatacacagaagcttgggatgctgacaaaacctccatccacgtgatgccagacaccccagatatcctgctggccaagagtaattctgccaatatcagccaaaaactttacaccaagggatgggatgaatcaaagatgaaggactatgatctgagagcagatgctatttccatcaaaagtgccaaggcctccagggacatcgccagtgactacaaatacaaggaagcctatgagaaacagaaaggccaccacattggagcccagagcattgaagatgatcccaagattatgtgtgccatacatgcaggaaaaattcaaagtgaaagggagtacaagaaggaattccaaaagtggaaaaccaagttctctagcccagtggacatgttaagcatcttgctggccaagaaatgtcagactttggtcactgacattgattatcgcaattacctgcatgaatggacatgcatgccggatcaaaacgacattatccaagcaaaaaaggcctatgacctgcagagtgatgccctctacaaggctgacttggagtggttgcgtggcattggctggatgccccaagggtctcctgaagtgttgagagtcaaaaacgcccagaatatcttttgtgacagtgtctatcggacgcctgtggtgaaccttaagtacacaagcattgttgacacacctgaagtggtccttgctaaatcaaatgctgaaaatattagtattccaaagtacagagaggtttgggacaaggataaaacttcaatacacataatgccagatactccagaaattaatctcgctagagcaaatgctcttaatgtgagcaataaactttaccgtgagggctgggatgaaatgaaggcgggctgtgatgtccggctggatgccatccccatccaggctgccaaggcctccagggagattgccagtgactataaatataagcttgaccatgagaagcagaagggacactacgtgggcaccctcacagccagggatgacaacaagatccgctgggccctcatagctgacaagctccagaatgaacgagagtaccggctggactgggccaaatggaaggccaagatccagagccctgtggacatgctttccatcctgcactctaaaaattcccaggctctggtcagtgacatggattaccgcaattacctgcaccagtggacctgcatgcccgaccagaacgatgtgattcaggccaagaaggcctacgaactgcagagcgataatgtttacaaggctgacttggaatggttgcgtggaattgggtggatgccaaatgactccgtgtccgtcaatcatgccaaacatgccgcggacatcttcagtgagaaaaaatatcgcacaaaaatagaaactctcaactttacgcctgtggatgacagagttgattatgtgacagcgaaacaaagtggcgagatcctcgatgatattaaataccggaaagactggaatgccaccaaatcaaagtacaccctcacagaaacccccctgctgcacactgcccaggaggctgctaggatactggaccagtatctctacaaggaaggctgggagagacaaaaagccacaggttacattttgcctccagatgctgtgccatttgttcatgcccatcactgcaatgacgttcagagtgagctgaaatacaaagctgaacatgtgaagcaaaaaggtcattatgttggtgtcccgacgatgagagatgatcctaagctggtttggtttgagcatgcaggccagattcagaatgagagactatacaaagaggactatcacaaaacaaaggccaaaatcaatatacctgctgatatggtgtcagtcttggccgccaagcaggggcagacccttgtcagtgatattgattatcgtaattacttgcaccaatggatgtgtcatcctgaccagaacgatgttattcaggcaagaaaggcctatgacctacagagtgataatgtctacagagctgacctggagtggctccgaggcattggctggatcccactggattctgtggaccatgtaagggttactaagaaccaggaaatgatgagtcagatcaaatataagaaaaatgcccttgaaaactatcctaactttagaagtgtggtggatcctccagagattgttttagccaagattaattctgtcaatcaaagtgatgtaaaatataaagaaacatttaataaagcaaagggcaaatatacgttttcaccagatacaccacatatctcccactccaaagacatgggaaaactctacagtactatactgtataaaggggcgtgggagggcaccaaggcctatggctacaccctggatgagcgctacattcccattgttggagccaagcatgctgatctggtgaacagtgagcttaaatacaaagagacatatgagaagcagaaaggtcactacctggctggaaaagtgatcggtgaattccctggtgtggttcactgtctggatttccaaaagatgaggagtgcgttgaactacagaaaacattatgaggataccaaagcaaatgttcatatccccaatgacatgatgaatcacgtgctggctaaaaggtgccagtacatcctcagtgacctggagtatcgacactatttccaccagtggacgtctcttctggaagaacccaatgttatacgcgtccgaaacgcccaggagatcttgagtgataatgtgtataaagatgacctgaattggttgaaaggcattggttgctacgtttgggatacaccccaaatcctccatgccaagaaatcatacgaccttcagagtcagctacaatatacagcagcaggtaaagaaaatctacaaaactataatctggtcacagacacgcccctctatgtgactgctgttcagagtggcattaatgccagtgaggtaaaatataaagaaaattatcatcagattaaggacaaatacacaacagttctagaaacagtggattatgacagaaccagaaacctgaagaatctttacagcagtaacctgtacaaggaggcctgggatagagtgaaagccaccagctacatcctgccttccagcaccttgtccctgacacacgccaagaaccagaagcatctggccagccatatcaaatatcgggaagaatatgaaaagttcaaagctctttatacgttaccaagaagtgttgacgatgatccgaacacagcacggtgcctccgagttggcaagcttaacatcgatcgcctgtacagatcagtttatgaaaagaacaagatgaaaatccacatcgtgcccgacatggtagagatggttactgccaaggattcccagaagaaagtcagtgagattgattaccgcctgcgcctccacgaatggatttgccaccccgacttgcaagtcaatgatcacgtcaggaaagtcacagatcagatcagcgatattgtatacaaggatgacctcaactggctgaaaggcattggttgctacgtctgggacactcctgaaatcctccatgccaagcatgcttatgatctacgtgatgatatcaagtataaagctcacatgttgaaaacaaggaatgactacaagcttgtcacagatacaccagtctacgtgcaggctgtcaaaagtgggaaacagctaagtgacgctgtctaccactatgactatgtgcacagtgtcagaggcaaagtggctccaactaccaaaaccgtggatctggaccgggcccttcatgcatacaagctccagagttcgaatctatacaaaaccagcctgcgcaccctgcccactggatatagacttccaggtgacactcctcacttcaaacacatcaaggacacccgttacatgagcagttatttcaagtacaaagaagcctatgaacacaccaaggcatatgggtatacacttggccccaaagatgttccatttgtccacgtccggagagtcaacaatgttaccagcgagagactgtatcgggaattgtaccacaaactgaaagacaagatccatacaactcccgatacccctgagatccgccaagtcaagaagacacaagaggctgtcagtgagttgatctacaaatcagacttcttcaagatgcagggccacatgatctctctgccatacacaccccaagtgatccattgccgctatgtgggagacatcaccagtgatattaaatacaaagaggacttgcaggtcctgaagggatttggctgcttcctgtatgacactcctgacatggtccgctcccggcacctgcggaagctctggtctaattacctatacactgataaggcaaggaagatgcgagacaaatacaaagtggtgcttgacactccagaatacagaaaagtgcaagaactgaagacacatctgagtgagctggtctacagagctgcaggcaagaagcagaagtcaatctttacttcagttcctgatactcctgatcttttaagagccaagcgagggcagaagcttcagagtcagtatctgtatgttgaacttgccaccaaagagagaccccatcatcacgctggaaaccagaccacagccttgaagcatgctaaagacgtgaaggacatggtcagtgagaaaaagtacaagattcaatatgaaaagatgaaagacaagtacactccggttccagatacgccaatcctcatcagagccaagagggcttactggaatgccagtgatctacgctacaaagaaacatttcaaaagaccaaagggaaataccacacggtgaaagatgccctagacattgtctatcatcgcaaagtcacagatgacatcagtaaaataaaatacaaggagaactacatgagccagttgggtatctggaggtccattcctgatcgtccagagcatttccaccaccgagcagtcactgacacagtcagtgatgtaaaatataaagaagacttgacttggcttaaaggcattggttgctatgcctatgatacccctgatttcactctggctgaaaagaacaagactctctacagcaagtataagtataaagaagtatttgaaaggacaaagtcagatttcaagtatgttgccgactctccgatcaataggcatttcaagtatgcaactcaattgatgaatgagaaaaaatacagagctgattatgagcagcggaaagataaataccacctggtagtcgatgagcctagacatctgctggctaagaccgcaggcgaccagatcagtcagatcaaatacaggaaaaactatgaaaaatcaaaggacaaatttacctcaattgtggatactccagaacacctgcgtactacaaaagtcaacaaacaaatcagcgatatcctttataaattggaatacaacaaggccaaacccagaggctacaccacaatccacgacacacccatgttgctgcatgtccgcaaggttaaagatgaagtcagtgatctgaaatacaaagaagtataccaaagaaataaatccaactgcaccattgagccagatgctgttcatatcaaagcagccaaggacgcctacaaagtcaacaccaatctggactataagaaacagtacgaagccaacaaagcccactggaagtggactcctgaccgaccggacttcctccaggctgccaagtcatccctgcagcaaagcgattttgaatataagctggaccgggagttcctcaagggttgcaagctttctgtcactgatgacaaaaacacggtgctcgccctcaggaatactttaatagaaagtgatctgaaatacaaagagaaacatgtcaaggaaagaggaacctgccatgccgtacctgacacgcctcagatcctgctggcgaagactgtcagcaacctggtgtctgagaacaagtacaaggaccatgtcaagaagcacttggcacagggctcatacacaacactaccagagacccgggacactgttcacgtcaaggaagtgaccaagcatgtcagtgatacaaattacaaaaagaagtttgtcaaggagaaaggaaaatccaactactccatcatgctggagccaccagaggtgaaacatgctatggaagtggccaagaagcaaagtgatgtcgcttacagaaaagatgccaaagagaacctgcattacaccacagtggctgatcgaccagacatcaagaaggccacacaggcagccaaacaggccagtgaggtggagtacagagccaagcaccgcaaggaaggcagccatggcttaagcatgctcggtcgcccagacatagaaatggccaagaaggcagccaagctgagcagccaggttaaataccgagaaaatttcgataaagaaaagggcaagacaccaaaatacaatccaaaagacagccagctctacaaagtcatgaaagatgctaataatcttgcaagtgaggttaaatacaaggctgacctgaagaaacttcacaaacccgtgactgacatgaaggagtctctgatcatgaatcatgtcctgaatacaagccaacttgccagttcttaccagtacaagaagaagtatgagaagagtaaaggccactaccacaccatacccgataatctggagcagcttcacctaaaagaggccacagaattacagagtatagtgaaatacaaagaaaagtatgaaaaggaacgaggaaaacccatgctggactttgaaacaccaacgtacatcactgccaaagagtctcagcagatgcagagtgggaaagaatataggaaagattatgaagagtccattaaaggcagaaacctgactggcctggaggtcacgccagctttgttacatgtcaaatatgcaactaaaatagcaagcgagaaagagtacaggaaagatctagaggaaagcatccgtgggaagggcctcactgaaatggaagatacacctgacatgctaagagcaaagaatgccactcaaatcctcaatgagaaagaatataagcgagacctggaactggaagtcaaaggaagaggcctgaatgccatggccaatgaaactccggattttatgagggccaggaatgctactgatattgccagtcagattaagtataagcaatcagcagaaatggagaaagccaatttcacttctgtggttgatactccagagatcattcatgcccaacaagtcaagaatctttcaagccagaaaaagtacaaggaagatgctgagaagtccatgtcgtattatgagactgttttggacaccccagagatacagagagtccgggagaaccaaaagaacttcagccttctccaataccagtgtgaccttaaaaacagtaaaggaaaaattacagttgttcaagacacgccagaaatactgcgtgtaaaagaaaatcagaagaatttcagctcggttttatataaagaggatgtctcaccaggaacggctatcggaaagacacctgagatgatgagagtgaaacaaacacaggaccacattagctcggtgaagtataaggaagcaataggacaaggaactccaatccctgacctgcctgaagtgaaacgtgtgaaggagacgcagaagcacattagctcggttatgtacaaagaaaacttgggaacaggcattccaaccactgtgactccagagattgagagagtcaaacgcaatcaagagaactttagctcggttttgtacaaagaaaatttggggaaaggaatcccaacacctatcactccagagatggagagagtcaaacgcaatcaagagaactttagctcggtgttatacaaagaaaacatgggcaagggaacccctttacctgtcactcccgagatggaaagagtcaaacacaatcaagaaaatattagctcggttttgtacaaagaaaatgtggggaaagccaccgcaacccctgtcactcctgagatgcagagagtcaaacgcaatcaagaaaacattagctcggtgttatacaaagagaacctggggaaagcaacccccacaccctttactcctgagatggaaagagtgaaacgcaatcaagaaaactttagctcggtattgtacaaagagaacatgagaaaagcaactccgacacctgttactccagagatggagagagctaagcgcaaccaagaaaacattagctcggttctttattctgatagtttccggaaacaaatacaaggcaaagctgcctatgtattggatacccccgagatgagacgggtgagggagacccaacggcacatctcaacggtgaaatatcatgaagactttgagaaacacaagggttgcttcacaccagtggtgacagatcctatcactgaacgagtaaagaagaacatgcaggacttcagtgacattaactaccgaggtattcagaggaaagtggtagaaatggaacaaaaacggaatgaccaagatcaggagactattacaggtttacgtgtctggcgtactaatcctggttcggtttttgactatgatccagcagaagacaacatccagtcccgaagcttacacatgattaatgtccaagctcagcgccggagccgggagcagtcacgatctgccagtgcactaagcatcagtgggggtgaggagaagtctgagcattcagaagcaccagaccaccacctttcgacttacagcgacgggggtgtctttgcagtctcaacagcttacaaacatgcaaaaaccacagagctcccacaacaacgatcatcttcagttgctacccaacagacaacggtatcttccatcccatctcatccatctactgctggaaaaatcttccgtgccatgtatgactatatggctgctgatgcagatgaggtgtccttcaaggatggagatgccatcataaatgttcaagcaattgatgaaggctggatgtatggcactgtgcagaggactggcaggaccggaatgctcccagccaactacgttgaagctatttaggcatttcaaagcatcacacttgtctgcaggacttacagatcctgcagtcaatgtttcggtttagactctccactgttacctaagttctcaagctgcctatggtttttctgtgtcaatgtgatttatggtagtaccatcctttctcctttgggttttaaaataagttgcagaacagacactttaaaagcttctgcaatattatttctgtgcctagagtctttctccattataaacatgttttaacattatttcttttctaaaacagggattttgaatatgccaaacacattaaaggaaaaatagcagagatgttcaccttttccttgctgattgctaatgcttattatttctaattcagttctgaagttataaacttataatcaatacaaaccagcaactaataaaacctctaattctgc

SEQ ID NO: 278 - DNA, 2780 bp, Homo sapiens
aaactaacccctctttttctccaaaggagtgcttgtggagatcggatcttttctccagcaattgggggaaagaaggctttttctctgacttcgcttagtgtaaccagcggcgtatattttttaggcgccttttcgaaaacctagtagttaatattcatttgtttaaatcttattttatttttaagctcaaactgcttaagaataccttaattccttaaagtgaaataattttttgcaaaggggtttcctcgatttggagctttttttttcttccaccgtcatttctaactcttaaaaccaactcagttccatcatggtgatgttcaagaagatcaagtcttttgaggtggtctttaacgaccctgaaaaggtgtacggcagtggcgagaaggtggctggccgggtgatagtggaggtgtgtgaagttactcgtgtcaaagccgttaggatcctggcttgcggagtggctaaagtgctttggatgcagggatcccagcagtgcaaacagacttcggagtacctgcgctatgaagacacgcttcttctggaagaccagccaacaggtgagaatgagatggtgatcatgagacctggaaacaaatatgagtacaagttcggctttgagcttcctcaggggcctctgggaacatccttcaaaggaaaatatgggtgtgtagactactgggtgaaggcttttcttgaccgcccgagccagccaactcaagagacaaagaaaaactttgaagtagtggatctggtggatgtcaatacccctgatttaatggcacctgtgtctgctaaaaaagaaaagaaagtttcctgcatgttcattcctgatgggcgggtgtctgtctctgctcgaattgacagaaaaggattctgtgaaggtgatgagatttccatccatgctgactttgagaatacatgttcccgaattgtggtccccaaagctgccattgtggcccgccacacttaccttgccaatggccagaccaaggtgctgactcagaagttgtcatcagtcagaggcaatcatattatctcagggacatgcgcatcatggcgtggcaagagccttcgggttcagaagatcaggccttctatcctgggctgcaacatccttcgagttgaatattccttactgatctatgttagcgttcctggatccaagaaggtcatccttgacctgcccctggtaattggcagcagatcaggtctaagcagcagaacatccagcatggccagccgaaccagctctgagatgagttgggtagatctgaacatccctgataccccagaagctcctccctgctatatggatgtcattcctgaagatcaccgattggagagcccaaccactcctctgctagatgacatggatggctctcaagacagccctatctttatgtatgcccctgagttcaagttcatgccaccaccgacttatactgaggtggatccctgcatcctcaacaacaatgtgcagtgagcatgtggaagaaaagaagcagctttacctacttgtttctttttgtctctcttcctggacactcactttttcagagactcaacagtctctgcaatggagtgtgggtccaccttagcctctgacttcctaatgtaggaggtggtcagcaggcaatctcctgggccttaaaggatgcggactcatcctcagccagcgcccatgttgtgatacaggggtgtttgttggatgggtttaaaaataactagaaaaactcaggcccatccattttctcagatctccttgaaaattgaggccttttcgatagtttcgggtcaggtaaaaatggcctcctggcgtaagcttttcaaggttttttggaggctttttgtaaattgtgataggaactttggaccttgaacttatgtatcatgtggagaagagccaatttaacaaactaggaagatgaaaagggaaattgtggccaaaactttgggaaaaggaggttcttaaaatcagtgtttcccctttgtgcacttgtagaaaaaaaagaaaaaccttctagagctgatttgatggacaatggagagagctttccctgtgattataaaaaaggaagctagctgctctacggtcatctttgcttaagagtatactttaacctggcttttaaagcagtagtaactgccccaccaaaggtcttaaaagccatttttggagcctattgcactgtgttctcctactgcaaatattttcatatgggaggatggttttctcttcatgtaagtccttggaattgattctaaggtgatgttcttagcactttaattcctgtcaaattttttgttctccccttctgccatcttaaatgtaagctgaaactggtctactgtgtctctagggttaagccaaaagacaaaaaaaattttactacttttgagattgccccaatgtacagaattatataattctaacgcttaaatcatgtgaaagggttgctgctgtcagccttgcccactgtgacttcaaacccaaggaggaactcttgatcaagatgcccaaccctgtgatcagaacctccaaatactgccatgagaaactagagggcaggtcttcataaaagccctttgaacccccttcctgccctgtgttaggagatagggatattggcccctcactgcagctgccagcacttggtcagtcactctcagccatagcactttgttcactgtcctgtgtcagagcactgagctccacccttttctgagagttattacagccagaaagtgtgggctgaagatggttggtttcatgt

SEQ ID NO: 279 - DNA, 2780 bp, Homo sapiens; identical to SEQ ID NO: 278

SEQ ID NO: 280 - DNA, 1440 bp, Homo sapiens
cagtcacatttcagccactgctctgagaatttgtgagcagcccctaacaggctgttacttcactacaactgacgatatgatcatcttaatttacttatttctcttgctatgggaagacactcaaggatggggattcaaggatggaatttttcataactccatatggcttgaacgagcagccggtgtgtaccacagagaagcacggtctggcaaatacaagctcacctacgcagaagctaaggcggtgtgtgaatttgaaggcggccatctcgcaacttacaagcagctagaggcagccagaaaaattggatttcatgtctgtgctgctggatggatggctaagggcagagttggataccccattgtgaagccagggcccaactgtggatttggaaaaactggcattattgattatggaatccgtctcaataggagtgaaagatgggatgcctattgctacaacccacacgcaaaggagtgtggtggcgtctttacagatccaaagcaaatttttaaatctccaggcttcccaaatgagtacgaagataaccaaatctgctactggcacattagactcaagtatggtcagcgtattcacctgagttttttagattttgaccttgaagatgacccaggttgcttggctgattatgttgaaatatatgacagttacgatgatgtccatggctttgtgggaagatactgtggagatgagcttccagatgacatcatcagtacaggaaatgtcatgaccttgaagtttctaagtgatgcttcagtgacagctggaggtttccaaatcaaatatgttgcaatggatcctgtatccaaatccagtcaaggaaaaaatacaagtactacttctactggaaataaaaactttttagctggaagatttagccacttataaaaaaaaaaaaaaggatgatcaaaacacacagtgtttatgttggaatcttttggaactcctttgatctcactgttattattaacatttatttattatttttctaaatgtgaaagcaatacataatttagggaaaattggaaaatataggaaactttaaacgagaaaatgaaacctctcataatcccactgcatagaaataacaagcgttaacattttcatatttttttctttcagtcatttttctatttgtggtatatgtatatatgtacctatatgtatttgcatttgaaattttggaatcctgctctatgtacagttttgtattatactttttaaatcttgaactttataaacattttctgaaatcattgattattctacaaaaacatgattttaaacagctgtaaaatattctatgatatgaatgttttatgcattatttaagcctgtctctattgttggaatttcaggtcattttcataaatattgttgcaataaatatccttgaacacaaaaaaaaaaaaaaaaaa

SEQ ID NO: 281 - DNA, 363 bp, Homo sapiens
aagtataatacaaactgtacatagagcaggattccaaaatttcaaatgcaaatacatataggtacatatatacatataccacaaatacaaaaatgactgaaagaaaaaaatatgaaaatgttaacgcttgttatttctatgcagtgggattatgagaggtttcattttctcgtttaaagtttcctatattttccaattttccctaaattatgtattgctttcacatttagaaaaataataaataaatgttaataataacagtgagatcaaggagttccaaaagattccaacataaacactgtgtgttttgatcatcctttttttttataagtggctaatcttccagctaaaaagtttttattt

SEQ ID NO: 282 - DNA, 1524 bp, Homo sapiens
gcagagcacagcatcgtcgggaccagactcgtctcaggccagttgcagccttctcagccaaacgccgaccaaggaaaactcactaccatgagaattgcagtgatttgcttttgcctcctaggcatcacctgtgccataccagttaaacaggctgattctggaagttctgaggaaaagcagctttacaacaaatacccagatgctgtggccacatggctaaaccctgacccatctcagaagcagaatctcctagccccacagacccttccaagtaagtccaacgaaagccatgaccacatggatgatatggatgatgaagatgatgatgaccatgtggacagccaggactccattgactcgaacgactctgatgatgtagatgacactgatgattctcaccagtctgatgagtctcaccattctgatgaatctgatgaactggtcactgattttcccacggacctgccagcaaccgaagttttcactccagttgtccccacagtagacacatatgatggccgaggtgatagtgtggtttatggactgaggtcaaaatctaagaagtttcgcagacctgacatccagtaccctgatgctacagacgaggacatcacctcacacatggaaagcgaggagttgaatggtgcatacaaggccatccccgttgcccaggacctgaacgcgccttctgattgggacagccgtgggaaggacagttatgaaacgagtcagctggatgaccagagtgctgaaacccacagccacaagcagtccagattatataagcggaaagccaatgatgagagcaatgagcattccgatgtgattgatagtcaggaactttccaaagtcagccgtgaattccacagccatgaatttcacagccatgaagatatgctggttgtagaccccaaaagtaaggaagaagataaacacctgaaatttcgtatttctcatgaattagatagtgcatcttctgaggtcaattaaaaggagaaaaaatacaatttctcactttgcatttagtcaaaagaaaaaatgctttatagcaaaatgaaagagaacatgaaatgcttctttctcagtttattggttgaatgtgtatctatttgagtctggaaataactaatgtgtttgataattagtttagtttgtggcttcatggaaactccctgtaaactaaaagcttcagggttatgtctatgttcattctatagaagaaatgcaaactatcactgtattttaatatttgttattctctcatgaatagaaatttatgtagaagcaaacaaaatacttttacccacttaaaaagagaatataacattttatgtcactataatcttttgttttttaagttagtgtatattttgttgtgattatctttttgtggtgtgaataaatcttttatcttgaatgtaataagaatttggtggtgtcaattgcttatttgttttcccacggttgtccagcaattaataaaacataaccttttttactgcctaaaaaaaaaaaaaaaaaaaa

SEQ ID NO: 283 - DNA, 1684 bp, Homo sapiens
cgttacaccatggatctgactgccatctacgagagcctcctgtcgctgagccctgacgtgcccgtgccatccgaccatggagggactgagtccagcccaggctggggctcctcgggaccctggagcctgagcccctccgactccagcccgtctggggtcacctcccgcctgcctggccgctccaccagcctagtggagggccgcagctgtggctgggtgcccccaccccctggcttcgcaccgctggctccccgcctgggccctgagctgtcaccctcacccacttcgcccactgcaacctccaccaccccctcgcgctacaagactgagctatgtcggaccttctcagagagtgggcgctgccgctacggggccaagtgccagtttgcccatggcctgggcgagctgcgccaggccaatcgccaccccaaatacaagacggaactctgtcacaagttctacctccagggccgctgcccctacggctctcgctgccacttcatccacaaccctagcgaagacctggcggccccgggccaccctcctgtgcttcgccagagcatcagcttctccggcctgccctctggccgccggacctcaccaccaccaccaggcctggccggcccttccctgtcctccagctccttctcgccctccagctccccaccaccacctggggaccttccactgtcaccctctgccttctctgctgcccctggcacccccctggctcgaagagaccccaccccagtctgttgcccctcctgccgaagggccactcctatcagcgtctgggggcccttgggtggcctggttcggaccccctctgtacagtccctgggatccgaccctgatgaatatgccagcagcggcagcagcctggggggctctgactctcccgtcttcgaggcgggagtttttgcaccaccccagcccgtggcagccccccggcgactccccatcttcaatcgcatctctgtttctgagtgacaaagtgactgcccggtcagatcagctggatctcagcggggagccacgtctcttgcactgtggtctctgcatggaccccagggctgtggggacttgggggacagtaatcaagtaatccccttttccagaatgcattaacccactcccctgacctcacgctggggcaggtccccaagtgtgcaagctcagtattcatgatggtgggggatggagtgtcttccgaggttcttgggggaaaaaaaattgtagcatatttaagggaggcaatgaaccctctcccccacctcttccctgcccaaatctgtctcctagaatcttatgtgctgtgaataataggccttcactgcccctccagtttttatagacctgaggttccagtgtctcctggtaactggaacctctcctgagggggaatcctggtgctcaaattaccctccaaaagcaagtgaccaaagccgttgccaaaccccacccataaatcaatgggccctttatttatgacgactttatttattctaatatgattttatagtatttatatatattgggtcgtctgcttcccttgtatttttcttcctttttttgtaatattgaaaacgacgatataattattataagtagactataatatatttagtaatatatattattaccttaaaagtctatttttgtgttttgggcatttttaaataaa

SEQ ID NO: 284 - DNA, 1278 bp, Homo sapiens
gcaggaggaggcagagcacagcatcgtcgggaccagactcgtctcaggccagttgcagccttctcagccaaacgccgaccaaggaaaactcactaccatgagaattgcagtgatttgcttttgcctcctaggcatcacctgtgccataccagttaaacaggctgattctggaagttctgaggaaaagcagctttacaacaaatacccagatgctgtggccacatggctaaaccctgacccatctcagaagcagaatctcctagccccacagaatgctgtgtcctctgaagaaaccaatgactttaaacaagagaccctcccaagtaagtccaacgaaagccatgaccacatggatgatatggatgatgaagatgatgacgaccatgtggacagccaggactccattgactcgaacgactctgatgatgtagatgacactgatgattctcaccagtctgatgagtctcaccattctgatgaatctgatgaactggtcactgattttcccacggacctgccagcaaccgaagttttcactccagttgtccccacagtagacacatatgatggccgaggtgatagtgtggtttatggactgaggtcaaaatctaagaagtttcgcagacctgacatccagtaccctgatgctacagacgaggacatcacctcacacatggaaagcgaggagttgaatggtgcatacaaggccatccccgttgcccaggacctgaacgcgccttctgattgggacagccgtgggaaggacagttatgaaacgagtcagctggatgaccagagtgctgaaacccacagccacaagcagtccagattatataagcggaaagctaatgatgagagcaatgagcattccgatgtgattgatagtcaggaactttccaaagtcagccgtgaattccacagccatgaatttcacagccatgaagatatgctggttgtagaccccaaaagtaaggaagaagataaacacctgaaatttcgtatttctcatgaattagatagtgcatcttctgaggtcaattaaaaggagaaaaaatacaatttctcactttgcatttagtcaaaagaaaaaatgctttatagcaaaatgaaagagaacatgaaatgcttctttctcagtttattggttgaatgtgtatctatttgagtctggaaataactgatgtgtttgataattagtttagtttgtggcttcatggaaactccctgtaaactaaaagcttcagggttatgtctatgttcattctatagaagaaatgc

SEQ ID NO: 285 - DNA, 776 bp, Homo sapiens
aaggacacgggcagcagacagtggtcagtcctttcttggctctgctgacactcgagcccacattccgtcacctgctcagaatcatgcaggtctccactgctgcccttgctgtcctcctctgcaccatggctctctgcaaccagttctctgcatcacttgctgctgacacgccgaccgcctgctgcttcagctacacctcccggcagattccacagaatttcatagctgactactttgagacgagcagccagtgctccaagcccggtgtcatcttcctaaccaagcgaagccggcaggtctgtgctgaccccagtgaggagtgggtccagaaatatgtcagcgacctagagctgagtgcctgaggggtccagaagcttcgaggcccagcgacctcggtgggccagtggggaggagcaggagcctgagccttgggaaacatgcgtgtgacctccacagctacctcttctatggactggttgttgccaaacagccacactgtgggactcttcttaacttaaattttaatttatttatactatttagtttttgtaatttattttcgatttcacagtgtgtttgtgattgtttgctctgagagttcccctgtcccctcccccttccctcacaccgcgtctggtgacaaccgagtggctgtcatcagcctgtgtaggcagtcatggcaccaaagccaccagactgacaaatgtgtatcggatgcttttgttcagggctgtgatcggcctggggaaataataaagcacgctcttttaaaaggt

SEQ ID NO: 286 - DNA, 5670 bp, Homo sapiens
cagtaaagagctgatcatggttctcactccttgaataccaggaacaccatctcgtatcacataatgagacagggagacattctggtcctcatctcacagatgaaaaatgtcaagcttcgaaggatcaaagtgcccacctagtcacacgggtagtcagccacaggtcagcctgccttatttattcttcatgagtatttatagtgactaacatttactgggcgcctactgtgggccatttctgtgcatgtgacaacccctttaagtccttgtttctaatcccaagaagcaaggaaatggggtcagggaagggacaaggtttgcccaagtccaggcagggggagaggtcaagctcagaaccatcacctgcccatgacacatgcccaggactcaggttccctaggcttccttccaaaggctcagcagtgacgagccagcccttgaaccagcctcttcccccacccaagcagccacctctcaggggaattgtggccaccacaggtgcagggagcagtttctctccactcacagcctgaagcatacccggcaggggctgtccccaggcccaacaagcaaagggcccagtagcgagggccactggagcccatctccggggggctgggcaggaagtagggtggggtttggggtagggatctggtaccctgggactgctgcaactcaaactaaccaacccactgggagaagatgcctgggggtccaggagtcctccaagctctgcctgccaccatcttcctcctcttcctgctgtctgctgtctacctgggtatgtggccaaagggcaggaactggcgggaggtgggggaagctgtggaggctgcagagagggcacaggcagagggaagggggctcagggaaaggggaagaggaggcagaggataggggacccagggaagatgcctatagaaatcgtatctgtgccaagatgggccaaggtggggctggagggagcccagcagaggagaaggggcgtccacagtctcacacagggaggcaggagcaagagtcacctcccccacctcctgttccccacaggccaaaataaggaactaaagttgctcttgactgagcaccagggctgggggcaggaaggggacttaggggtagcagcattcagcgtctgtcaaggggagaaaaagctttctctgccttaaacctcaggtgcctctctctgttgggagtcccttctcagcactgggggaatgggtgtctcatggactccccctcacctgctcaaggacagctggcaggggctgtggcacgctaacccaggagttcagagaaaaaggttccccacccaagggacactgggagcaaggattggagttcacgtctgagtcttaagcccgtgacgatgagggtgctcggcccctctccccatctcttcctccttctctcttcctcacctccctcctccacctacctccagaagaggggactggccatgtgggaggcctggctgagagctggggcttcccagaggagcccggattggacactgcagccagcctgagccgcctcgtctcactcagagacacccccagtctccaccccgctctgagccccttcaatcaccagcagcccagcccaaggactgaactcacccctgacccctaggttgacacatacaacttacagagaatgagggccaggcacagggtcacaggccagggcaggccacagactggctcctcagcccaggcagggagaggccagggagccaagagtttgaacccagtgccactcctgactgcctggtgatgctggcaacccgcctgccctcccagagcctcagccatccctcctgtaaaatggggctaaggagagaacctacttctagggttctgtgaatgattacacaagaaaaagcgccaggtgctgggcctggctgaggctggggtgcaaaaatggaccgggaaggctgcgggaggaggggacgcctgcactgcttctggaaggagctgtctggacagcgtcctccagtgcctggaacaaacatccaaaatccagagagttcacagggccagagtacaaagtgggtatgcgggagggggacaagagatggcgctgcagaggtgagaagggcctcccaggggtcttaccatcccagggagtctcattctcctctcccaggatatcctcacccaccccaaccaggtatgtcctctctccttcccaggggcttcttcactttcccgcatcccccctctccccaggatgtatcagcccctgtcaggggctctctctctccctccccacccaggagagtcctcaccctcttcccaggagtgctggaactgcaggggccagggctggggaaatgtgtcaccatccccagtccctgacccacccaccctgtctctccacaggccctgggtgccaggccctgtggatgcacaaggtcccagcatcattgatggtgagcctgggggaagacgcccacttccaatgcccgcacaatagcagcaacaacgccaacgtcacctggtggcgcgtcctccatggcaactacacgtggccccctgagttcttgggcccgggcgaggaccccaatggtacgctgatcatccagaatgtgaacaagagccatgggggcatatacgtgtgccgggtccaggagggcaacgagtcataccagcagtcctgcggcacctacctccgcgtgcgccgtgagtggcccagccctggcccctactcccactgtcccgctgggcactcggtttatctttgaagtggggatagagccagtaccttcaatgtgggtttcaaaccggcttggacagagggacggacattctcctctgcagagtggggtctctggggggtctggggccttgcaggaggtgggcggggcaggaggctagggagggcaagaggggccagggctctgagcatactacctccttgcagagccgccccccaggcccttcctggacatgggggagggcaccaagaaccgaatcatcacagccgaggggatcatcctcctgttctgcgcggtggtgcctgggacgctgctgctgttcagggtgagccccctcggacctctgagtcagccgggcgagggctgggcgagggacccccaatacccaggtagccctctagagcctgaggttccccatccaaaacttgggagaatgaaagcacccaccatataggggctgtgggagttaaatgaatgaatataaagaagggacttgaactggcgctgagccagggggtgtcttcaatttagtttccccttctggctgtcctcacgtccacctccccccaagaagagtctcattcttctccctaagagtgtcctcactcccctcctgccctcacccaggagtgtggttaccctccaggtgtagccaagaccagggaaggtggggcctggtcctcccagaatctctgatctgtaccagcctctccttaggcactacagaaagtgtgactgttattgttattattcatggagaatagtaagggagtggagactcaagaagacgctagcttgggaggccgaggcaagaggatcacttgaggccacaagtttgagaccagcctgggcaacacagcaagaccctatctctacacacacaaagtcttaaaaaaaaattagccaggcatggtggcacacacctatagtcccagctactcaggaggctgaggtgggaggattgcttgagcccaggagttcaaggctgcagtgaaatatgatgttgccacagcacttccagcctgggcaactgagggagaagaaagagagagagagagaaagagagagagagagagagagagagagagagggccagagggagggagggaaggaagggaagggaagggaaggaaggaaggaaggaaggaaggaaggaaggaaggaaggaaggaaggagaacactggttgtagactcagagagaactgttacataaccagtatgtggccttggggacatctcttaccctttctggaaaagtacttcctggcatccaggagggtctgaaagatattcacctccccctgctcactgaggcacccaccccacccacccctacagaaacgatggcagaacgagaagctcgggttggatgccggggatgaatatgaagatgaaaacctttatgaagtgagtgaagggtggggatggggtaggggcagttgtgttaggggtgggggtgttcctctgggggtggctgggggcagggaccccaggtgtcagggtgctgatgttcgctgcctcatttccatcccagggcctgaacctggacgactgctccatgtatgaggacatctcccggggcctccagggcacctaccaggatgtgggcagcctcaacataggagatgtccagctggagaagccgtgacacccctactcctgccaggctgcccccgcctgctgtgcacccagctccagtgtctcagctcacttccctgggacattctcctttcagcccttctgggggcttccttagtcatattcccccagtggggggtgggagggtaacctcactcttctccaggccaggcctccttggactcccctgggggtgtcccactcttcttccctctaaactgccccacctcctaacctaatccccacgccccgctgcctttcccaggctcccctcacccagcgggtaatgagcccttaatcgctgcctctaggggagctgattgtagcagcctcgttagtgtcaccccctcctccctgatctgtcagggccacttagtgataataaattcttcccaactgcagaccttggcaggagtcgtggatcttacggaaaccgcctctcccacatgtccctcagacccaggagtcccagcccaagccactccctgcccactccccacacctgggaccaggtagccagtctgggctgccctcctgggagaacaagatgtctcttgggaaggtccccagaccaactgaaggactggtttggccctctttgcagggctcaccctagggtcatatccttaagcaagaagggggacaagatcaagatggctgtggctaccaaattacttacactttttttttttttttttttttttgagacagagtctcactctgttgcccaggttggagtgctcactgcaacctctgcctcctgggttcaagcgattctcctgcctcagcctcccaagtagctgggattacaggcgcctgccaccatgcccagctaatttttgtatttttagtagaggcggggtttcaccatgttggccagactggtcttgaacctctgacctcaggtgatccacctaccttggcctcccaaagtgctgggattacaggcgcctgcaccacgcccggccgctttttttttttttttttttttttgaggcagagtctgactctgtcgcccaggctggagtgcagtggcgcaatctcagcccacttcaacctccacctcaagcgattcttgtacctcaggctcccgagtagctgggatgacaggcatgtgctaccacacccagctaatttttgttttagtagagacagggtttcgccatgttggccgggctggtctcgaactcctgacctcaagtgatccaccatgcttcggcctcccaaagtgctgggattacagcatgagccactttatgcgtatttaagccttggaaacacagggactatcttgtggattggggctagtaca

SEQ ID NO: 287 - DNA, 1741 bp, Homo sapiens
ctaggtagctggcaccaggagccgtgggcaagggaagaggccacaccctgccctgctctgctgcagccagaatgggtgtgaaggcgtctcaaacaggctttgtggtcctggtgctgctccagtgctgctctgcatacaaactggtctgctactacaccagctggtcccagtaccgggaaggcgatgggagctgcttcccagatgcccttgaccgcttcctctgtacccacatcatctacagctttgccaatataagcaacgatcacatcgacacctgggagtggaatgatgtgacgctctacggcatgctcaacacactcaagaacaggaaccccaacctgaagactctcttgtctgtcggaggatggaactttgggtctcaaagattttccaagatagcctccaacacccagagtcgccggactttcatcaagtcagtaccgccattcctgcgcacccatggctttgatgggctggaccttgcctggctctaccctggacggagagacaaacagcattttaccaccctaatcaaggaaatgaaggccgaatttataaaggaagcccagccagggaaaaagcagctcctgctcagcgcagcactgtctgcggggaaggtcaccattgacagcagctatgacattgccaagatatcccaacacctggatttcattagcatcatgacctacgattttcatggagcctggcgtgggaccacaggccatcacagtcccctgttccgaggtcaggaggatgcaagtcctgacagattcagcaacactgactatgctgtggggtacatgttgaggctgggggctcctgccagtaagctggtgatgggcatccccaccttcgggaggagcttcactctggcttcttctgagactggtgttggagccccaatctcaggaccgggaattccaggccggttcaccaaggaggcagggacccttgcctactatgagatctgtgacttcctccgcggagccacagtccatagaaccctcggccagcaggtcccctatgccaccaagggcaaccagtgggtaggatacgacgaccaggaaagcgtcaaaagcaaggtgcagtacctgaaggataggcagctggcaggcgccatggtatgggccctggacctggatgacttccagggctccttctgcggccaggatctgcgcttccctctcaccaatgccatcaaggatgcactcgctgcaacgtagccctctgttctgcacacagcacgggggccaaggatgccccgtccccctctggctccagctggccgggagcctgatcacctgccctgctgagtcccaggctgagcctcagtctccctcccttggggcctatgcagaggtccacaacacacagatttgagctcagccctggtgggcagagaggtagggatggggctgtggggatagtgaggcatcgcaatgtaagactcgggattagtacacacttgttgatgattaatggaaatgtttacagatccccaagcctggcaagggaatttcttcaactccctgccccctagccctccttatcaaaggacaccattttggcaagctctatcaccaaggagccaaacatcctacaagacacagtgaccatactaattataccccctgcaaagccagcttgaaaccttcacttaggaacgtaatcgtgtcccctatcctacttccccttcctaattccacagctgctcaataaagtacaagagtttaacagtgtg

SEQ ID NO: 288 - DNA, 1635 bp, Homo sapiens
aaaggaagagaaagggagagagggagagaagagggagagagcagagagacctcaccgagagagctgcaaaaccagcctggaaaaattagagtattacctaacattagtgaaaaataaaggtactttcttgagaagcccttggacccattctgcctcctggagttctgaacttttcactcactgcctattaattaatgttaagcctgcaaagaatggagttgtcctggatatttggccaaaaaaaaaatgtatccacaaacagggacgtaatcaggcagggagcctcgttaagaagttttgttcttgtcctaggagtgatgagagatcactgaaggatttagagaggggctgtatcatcaggcttgggttccaaagcctcactgagagagttggggagctgactgatgtcagatgctcgtgcagccgccccgtagggcctgtatttcctccatggtgcctcactgcagcaccgagcttgcaaaagatcctctctctttatgggaatttcaaaacagaagcaaaatagcaccggggcttaaagcattcttgggaatttccctgtctttccctctaaataatcagcatgtaaattgcaaaaaaaaaaaaaaaaaaaaaagacacgggcccaaaagggagcgctcagtttcaggctctttgctttccttcctcccgaggctctctggcccttacccagcctgaaaacaaaaagtgtgagggggagggtaggaaggtagttcaagcagggcaatgctgagcctgggaagaaaacaacagccttgtttagggcactgtggcttacgtaactaaattgtgcccagtttccacctggccaggggcctggagtgaatgctgaagatgcaaaggtagaggctgccagaaaagccaggaaattgctggcaagaaaggccagtggtggggtgcaggagtgggaggaaggctgggaaatgcggctgagtcacatctccagaagccccccatcatcaccctagtggctcttctgctggcaggcgcctcatgaagacctgacccaaagttttcaaaactctgcggtttctcaaccctcctctggtaatccatagtactcccccgcctccacttgccagcctcgtgattccttcatggacacatagctcagttcccataaaagggctggtttgccgcgtgggggagtggagtgggacaggtatataaaggaagtacagggcctggggaagaggccctgtctaggtagctggcaccaggagccgtgggcaagggaagaggccacaccctgccctgctctgctgcagccagaatgggtgtgaaggcgtctcaaacaggtatctgggctagccaaggttaatccatcagagttgtgggttttcaggcccagacagcccgcagagccatctgcctgctgggtgagggactaagggagtgggcagagggggaggagaagcagagccaggggagggactgaggctgcaaccaggaggtgggggtgggggagtgggtctcagttgcttgggggagggagcagggcggaagggcaggatgcacttgcaggggtctcatcctggatttctcttcaggctttgtggtcctggtgctgctccagtgctgtgagtaatccctccacctccacttttaagtcca

SEQ ID NO: 289 - DNA, 853 bp, Homo sapiens
  misc_feature (597)..(597): n is a, c, g, or t
  misc_feature (602)..(602): n is a, c, g, or t
  misc_feature (660)..(660): n is a, c, g, or t
tttttactttttataacagtttatttttactttgtacaaaatacaaaaatgcaaatccaaggagtacagaccagtagtgacaggcacactgcacaacagcaaccttgtctagcaagacaggagttttttaaattttattttagtgaatacatgcattatataaaacaacaacaacaacaacaacaaaaacacaaagaggctagagatttcaccgtttctacccccaaaataacgcttgctatcaagattttggagggggatgggggaaaagaatttaaaaggcaaataatttttttttcataaaaagtaaaagctaccataaaacatttttttttctgtcacactgattaaatttcttctgaaaagccgcacatatagacaaaacaaaacaaaaattcctgaactggacaaacagcaaatactcaacagggttgttaacctaggtaacagttcagtagtttaaagaatcttttagacatctggaagcctttctattcattcctcagtacagtgttccagccatcctgcttgttttttccctccaatacctcccagaacagaaacacttgcatcgagtctgttcctaagaactagttntgaanaagaagcgatgtacacaaatatttaacagaactatgaaagatgcatgaaaggagtctntcttcgtagcaaagtagtcgtgctatgcatggttcctttgattacttctcagggttgtttatctgccccatgaataccacagcacctgtaggataatgtctgatgaaaaaccagaaaaggtctgtcatctataatcaagtgaggcgatgatcttgcaatgagaaatgcagcgatcgttgctgaagctttggtt

SEQ ID NO: 290 - DNA, 2492 bp, Homo sapiens
cccgggcgggcgagaggctctcaactgggcgggaaggtgcgggaaggtgcggaaaggttcgcgaaagttcgcggcggcgggggtcgggtgaggcgcaaaaggataaaaagcccgtggaagcggagctgagcagatccgagccgggctggctgcagagacaccgcagggagagcctcactgctgagcgcccctcgacggcggacgggcagcagcctccgtggcctccagcatccgacaagaagcttcagccatgcaggccccacgggagctcgcggtgggcatcgacctgggcaccacctactcgtgcgtgggcgtgtttcagcagggccgcgtggagatcctggccaacgaccagggcaaccgcaccacgcccagctacgtggccttcaccgacaccgagcggctggtcggggacgcggccaagagccaggcggccctgaacccccacaacaccgtgttcgatgccaagcggctgatcgggcgcaagttcgcggacaccacggtgcagtcggacatgaagcactggcccttccgggtggtgagcgagggcggcaagcccaaggtgccggtatcgtaccgcggggaggacaagacgttctaccccgaggagatctcgtccatggtgctgagcaagatgaaggagacggccgaggcgtacctgggccagcccgtgaagcacgcagtgatcaccgtgcccgcctatttcaatgactcgcagcgccaggccaccaaggacgcgggggccatcgcggggctcaacgtgttgcggatcatcaatgagcccacggcagctgccatcgcctatgggctggaccggcggggcgcgggagagcgcaacgtgctcatttttgacctgggtgggggcaccttcgatgtgtcggttctctccattgacgctggtgtctttgaggtgaaagccactgctggagatacccacctgggaggagaggacttcgacaaccggctcgtgaaccacttcatggaagaattccggcggaagcatgggaaggacctgagcgggaacaagcgtgccctcggcaggctgcgcacagcctgtgagcgcgccaagcgcaccctgtcctccagcacccaggccaccctggagatagactccctgttcgagggcgtggacttctacacgtccatcactcgtgcccgctttgaggaactgtgctcagacctcttccgcagcaccctggagccggtggagaaggccctgcgggatgccaagctggacaaggcccagattcatgacgtcgtcctggtggggggctccactcgcatccccaaggtgcagaagttgctgcaggacttcttcaacggcaaggagctgaacaagagcatcaaccctgatgaggctgtggcctatggggctgctgtgcaggcggccgtgttgatgggggacaaatgtgagaaagtgcaggatctcctgctgctggatgtggctcccctgtctctggggctggagacagcaggtggggtgatgaccacgctgatccagaggaacgccactatccccaccaagcagacccagactttcaccacctactcggacaaccagcctggggtcttcatccaggtgtatgagggtgagagggccatgaccaaggacaacaacctgctggggcgttttgaactcagtggcatccctcctgccccacgtggagtcccccagatagaggtgacctttgacattgatgctaatggcatcctgagcgtgacagccactgacaggagcacaggtaaggctaacaagatcaccatcaccaatgacaagggccggctgagcaaggaggaggtggagaggatggttcatgaagccgagcagtacaaggctgaggatgaggcccagagggacagagtggctgccaaaaactcgctggaggcccatgtcttccatgtgaaaggttctttgcaagaggaaagccttagggacaagattcccgaagaggacaggcgcaaaatgcaagacaagtgtcgggaagtccttgcctggctggagcacaaccagctggcagagaaggaggagtatgagcatcagaagagggagctggagcaaatctgtcgccccatcttctccaggctctatggggggcctggtgtccctgggggcagcagttgtggcactcaagcccgccagggggaccccagcaccggccccatcattgaggaggttgattgaatggcccttcgtgataagtcagctgtgactgtcagggctatgctatgggccttctagactgtcttctatgatcctgcccttcagagatgaactttccctccaaagctagaactttcttcccaggataactgaagtcttttgactttttgcggggagggcggttcatcctcttctgcttcaaataaaaagtcattaatttattaaaacttgtgtggcactttaacattgctttcacctatattttgtgtactttgttacttgcatgtatgaattttgttatgtaaaatatagttatagacctaaataagct

SEQ ID NO: 291 - DNA, 778 bp, Homo sapiens
ctccaggtcccttctccagccacccagccccaagatggtgatgctgctgctgctgctttccgcactggctggcctcttcggtgcggcagagggacaagcatttcatcttgggaagtgccccaatcctccggtgcaggagaattttgacgtgaataagtatctcggaagatggtacgaaattgagaagatcccaacaacctttgagaatggacgctgcatccaggccaactactcactaatggaaaacggaaagatcaaagtgttaaaccaggagttgagagctgatggaactgtgaatcaaatcgaaggtgaagccaccccagttaacctcacagagcctgccaagctggaagttaagttttcctggtttatgccatcggcaccgtactggatcctggccaccgactatgagaactatgccctcgtgtattcctgtacctgcatcatccaactttttcacgtggattttgcttggatcttggcaagaaaccctaatctccctccagaaacagtggactctctaaaaaatatcctgacttctaataacattgatgtcaagaaaatgacggtcacagaccaggtgaactgccccaagctctcgtaaccaggttctacagggaggctgcacccactccatgttacttctgcttcgctttcccctaccccccccccataaagacaaaccaatcaaccacgacaaaggaagttgacctgaacatgtaaccatgccctaccctgttaccttgctagctgcaaaataaacttgttgctgacctgc

SEQ ID NO: 292 - DNA, 822 bp, Homo sapiens
ggctgattctgcatctggaaactgccttcatcttgaaagaaaagctccaggtcccttctccagccacccagccccaagatggtgatgctgctgctgctgctttccgcactggctggcctcttcggtgcggcagagggacaagcatttcatcttgggaagtgccccaatcctccggtgcaggagaattttgacgtgaataagtatctcggaagatggtacgaaattgagaagatcccaacaacctttgagaatggacgctgcatccaggccaactactcactaatggaaaacggaaagatcaaagtgttaaaccaggagttgagagctgatggaactgtgaatcaaatcgaaggtgaagccaccccagttaacctcacagagcctgccaagctggaagttaagttttcctggtttatgccatcggcaccgtactggatcctggccaccgactatgagaactatgccctcgtgtattcctgtacctgcatcatccaactttttcacgtggattttgcttggatcttggcaagaaaccctaatctccctccagaaacagtggactctctaaaaaatatcctgacttctaataacattgatgtcaagaaaatgacggtcacagaccaggtgaactgccccaagctctcgtaaccaggttctacagggaggctgcacccactccatgttacttctgcttcgctttcccctaccccccccccataaagacaaaccaatcaaccacgacaaaggaagttgacctgaacatgtaaccatgccctaccctgttaccttgctagctgcaaaataaacttgttgctgacctgc

SEQ ID NO: 293 - DNA, 4416 bp, Homo sapiens
ccagtgtaagagttccgctattcggtctcacacctacagtggactacccgatttttcgcttctcttcagggatgagtcatgtggtggtgaaaaatgaccctgaactggaccagcagcttgctaatctggacctgaactctgaaaaacagagtggaggagcaagtacagcgagcaaagggcgctatatacctcctcacttaaggaacaaagaagcatctaaaggattccatgataaagacagttcaggttggagttgcagcaaagataaggatgcatatagcagttttgggtctcgagattctagaggaaagcctggttatttcagtgaacgtggaagtggatcaaggggaagatttgatgatcgtggacggagtgactatgatggtattggcaatcgtgaaagacctggctttggcagatttgaacggagtggacatagtcgttggtgtgacaagtcagttgaagatgattggtcaaaaccacttccaccaagtgaacgcttggagcaagaactgttttctggaggaaacacggggattaactttgagaaatatgatgatataccagtagaggcaaccggcagtaactgtcctccacatattgagaattttagcgatattgacatgggagaaattatcatggggaacattgaacttactcgctatactcgtcctactccagtgcaaaaacatgccattcctattattaagggaaaaagagacttagtggcttgtgcccaaacaggatctgggaaaactgcagcatttcttttacccatactgagtcagatatatacagatggtccaggagaagctttgaaggctgtgaaggaaaatggaaggtatgggcgccgcaaacaatatccaatatccttggttttagccccaacaagagaattggctgtacagatctatgaggaagccagaaaattttcctaccgatctagagttcgtccttgtgtagtttatggtggtgctgatattggtcagcagattcgggacttagaacgtggatgccacttgttagtagccactccaggacgtctagtggatatgatggaaagaggaaagattggattagacttctgcaagtacttagtgttggatgaagctgataggatgctggatatgggatttgaacctcagatacgtcgtatagttgaacaagatactatgccaccaaagggcgttcgtcacaccatgatgtttagtgctacttttcctaaggaaatacagatgcttgctcgtgactttttggatgaatatatctttttggctgtaggcagagtaggctctacctctgagaacatcacacagaaagtagtttgggtggaagacttagataaacggtcatttctactggacattttaggtgcaacagggagtgattcacttactttagtgtttgtggagaccaaaaagggagcagattccctggaggatttcttataccatgaaggatatgcttgtactagtattcatggagaccggtcacagagagatcgagaggaggcccttcaccagtttcgctcaggaaaaagcccaattctagtggctacagctgtggcagcacgaggactagacatttcaaatgtgagacatgttatcaattttgatttgccaagtgatattgaagaatatgtgcatcgtattggccgtacaggacgtgtaggaaacctgggccttgccacctcattctttaatgaaaaaaatatgaatattacaaaggatttgttggatcttcttgtagaagctaaacaagaagtgccttcttggttggaaaatatggcttatgaacaccactacaagggtggcagtcgtggacgatctaaaagtaatagattcagtggaggatttggtgccagagactatcgacaaagtagtggttccagcagttccggctttggtgctagtcgcggaagcagcagccgcagtggtggaggtggttacggcgacagcagaggatttggtggaggtggctatggaggcttctacaatagtgatggatatggaggaaattataactcccagggggttgactggtggggcaactgaatctgctttgcagcaaagtcacccttacaaagaagctaatatggaaaccacatgtaacttagccagactatattgtgtagcttcaagaacttgcagtacattaccagctgtgattctcctgataattcaagggagctcaaagtcacaagaagaaaaatgaaaggaaaaaacagcagccctattcagaaattggtttgaagatgtaattgctctagtttggattaaactcttcccctcctgctttagtgccaccccaaactgcatttataattttgtgactgaggatcgtttgtttgttaacgtactgtgactttaactttagacaacttactactttgatgtcctgttggctcagtaatgctcacgataccaattgttttgacaaaataaatttactaaacttggcctaaaatcaaaccttggcacagaggtatgatacaactttaacaggagtcatcaattcatccataaatataaaaagggaaaaaaacttaaggcagtagtctgcattaggactgtttgagttttgcagacttggggttgggagaacatcttaaagcattaaagcatagttttttgtatggccaaccttactaaattaagttctgacttgctcactctatcctggataggcacttgggaacttacactctttaagccattccagtcatgatgaggtggaatgtatcagtataccaattaatatttttgaaagagttcttttaggttaatttaagtacagcaatttctcatgtaatgtttagggagtttattctaacctaggcaaacggcatgctatcacaagaaaggtttaaagctttgataaaatgggggagatttaatcagtttttttaatgcctgctataaaaatttgaaatattagaatggccgaccatggcagtgaccaggcctcactacaggcctggttggattctggtctttaatgcatgctagtgttgatgttttttggtcaagaacggtttaaacaggaaggattgtgcagcaggctttaatttaatgtagattcatactgctctgttaaagctgcattgaaatgttaaaatggcttacacttgcagactttgcaaatcttaagactaacaaatccttgaaatcacacagcttgcaaatacgtactaaactgcacaaggtgtgtgttctatatgtgcagttttagcgtattttagttgcataggtttccatggtatttatagtctcttgtgctaaatttggccaaagatgattgtccaccactaaaaatgcctctcccacttggaattctgtactgattttgtggccagatgcaatgatctttaaaaacaaatcttttcaatggcataagaagttgacaaaaatttcttaaagtgcaatagattttcaagttattgtgccttgttctaaaattttaagtagggcacttgacagtattgaggtcatttgttaaggtgctatttcaattagtgtaggtttagactcttgtacatttctcccataactttttacaaagtattttgttgcacattcagagaattttatatatatatgtcttgtgtgggtgtcctcgaccttccaatcttatttcgtctcttggagattgttgaatgcagccagtgaagaagtagattcctaaattttattggggaccatggaatggtagttgagaagaaaactatttgcacacaacagattttagatactttttgctgctagttgtgtaatatttattgaacattttgacaaatatttatttttgtaagcctaaaaatgattctttgaaagtttaaagaaacttgaccaaaagacagtacaaaaaacactggcacttgaatgttgaatgtcaccgtatgtgaaataatatattttggggtagtgtgagcttttaatgttaagtctgttaaacttgagtcaaattaagcagacccggcattggcaatgtagctgtaattttctgacaaaatttaagacaaaattgtcaacttgaaactaaaacatgccaaggttttgatatacttgtcttaagatattaatgaaacaattttgaacactgataggaaggtccacatccacaaagtttctcttgagttttgttatgtgttttgctgtgtttgattttcagtgattgtctggtatatttacagtcctcaaacatggttatttctgtcagtgacttaacattcggttttaccagccagcagtattcttcagtaaataaagaatggaattgctgaatgtaatcattgaacctcgagtcactgtaaaagttcagtaattgcttattgtattagttttagatgctggcaccgcatgtgctctgtttattctgattttactaaaataaaaagttcaaaagtcaaaaaaaaaa

SEQ ID NO: 294 - DNA, 2800 bp, Homo sapiens
agcgcaggggaggagaagaaaagagagggatagtgtatgagcaagaaagacagattcattcaagggcagtgggaattgaccacagggattatagtccacgtgatcctgggttctaggaggcagggctatattgtggggggaaaaaatcagttcaagggaagtcgggagacctgatttctaatactatatttttcctttacaagctgagtaattctgagcaagtcacaaggtagtaactgaggctgtaagattacttagtttctccttattaggaactctttttctctgtggagttagcagcacaagggcaatcccgtttcttttaacaggaagaaaacattcctaagagtaaagccaaacagattcaagcctaggtcttgctgactatatgattggttttttgaaaaatcatttcagcgatgtttactatctgattcagaaaatgagactagtaccctttggtcagctgtaaacaaacacccatttgtaaatgtctcaagttcaggcttaactgcagaaccaatcaaataagaatagaatctttagagcaaactgtgtttctccactctggaggtgagtctgccagggcagtttggaaatatttacttcacaagtattgacactgttgttggtattaacaacataaagttgctcaaaggcaatcattatttcaagtggcttaaagttacttctgacagttttggtatatttattggctattgccatttgctttttgttttttctctttgggtttattaatgtaaagcagggattattaacctacagtccagaaagcctgtgaatttgaatgaggaaaaaattacatttttgtttttaccaccttctaactaaatttaacattttattccattgcgaatagagccataaactcaaagtggtaataacagtacctgtgattttgtcattaccaatagaaatcacagacattttatactatattacagttgttgcagatacgttgtaagtgaaatatttatactcaaaactactttgaaattagacctcctgctggatcttgtttttaacatattaataaaacatgtttaaaattttgatattttgataatcatatttcattatcatttgtttcctttgtaatctatattttatatatttgaaaacatctttctgagaagagttccccagatttcaccaatgaggttcttggcatgcacacacacagagtaagaactgatttagaggctaacattgacattggtgcctgagatgcaagactgaaattagaaagttctcccaaagatacacagttgttttaaagctaggggtgaggggggaaatctgccgcttctataggaatgctctccctggagcctggtagggtgctgtccttgtgttctggctggctgttatttttctctgtccctgctacgtcttaaaggacttgtttggatctccagttcctagcatagtgcctggcacagtgcaggttctcaatgagtttgcagagtgaatggaaatataaactagaaatatatccttgttgaaatcagcacaccagtagtcctggtgtaagtgtgtgtacgtgtgtgtgtgtgtgtgtgtgtgtgtgtaaaaccaggtggagatataggaactattattggggtatgggtgcataaattgggatgttctttttaaaaagaaactccaaacagacttctggaaggttattttctaagaatcttgctggcagcgtgaaggcaacccccctgtgcacagccccacccagcctcacgtggccacctctgtcttcccccatgaagggctggctccccagtatatataaacctctctggagctcgggcatgagccagcaaggccacccatccaggcacctctcagcacagcagagctttccagaggaagcctcaccaagcctctgcaatgaggttcttctgtgcacgttgctgcagctttgggcctgagatgccagctgtccagctgctgcttctggcctgcctggtgtgggatgtgggggccaggacagctcagctcaggaaggccaatgaccagagtggccgatgccagtataccttcagtgtggccagtcccaatgaatccagctgcccagagcagagccaggccatgtcagtcatccataacttacagagagacagcagcacccaacgcttagacctggaggccaccaaagctcgactcagctccctggagagcctcctccaccaattgaccttggaccaggctgccaggccccaggagacccaggaggggctgcagagggagctgggcaccctgaggcgggagcgggaccagctggaaacccaaaccagagagttggagactgcctacagcaacctcctccgagacaagtcagttctggaggaagagaagaagcgactaaggcaagaaaatgagaatctggccaggaggttggaaagcagcagccaggaggtagcaaggctgagaaggggccagtgtccccagacccgagacactgctcgggctgtgccaccaggctccagagaaggtaagaatgcagagtggggggactctgagttcagcaggtgatatggctcgtagtgacctgctacaggcgctccaggcctccctgcctgccctttctcctagagactgcacagctagcacaagacagatgaattaaggaaagcacagcgatcaccttcaagtattactagtaatttagctcctgagagcttcatttagattagtggttcagagttcttgtgcccctccatgtcagttttcacagtccatagcaaaaggagaaataaaaggaccgggtgagatgtgtctgcat

SEQ ID NO: 295 - DNA, 1024 bp, Homo sapiens
gaaggacttcctcctctgtgtcactgaagtcataggggtgtatgaatccccatcttggcatctggctggcgagtcttccttctcttcctcttctgctcctggtcctcttggcttttctcctcttcatcttctgtctctgattcatcctcacttcgcttcttacgtttcttctccttctccagaaccttcttaaagtaagcatactggaccaactccacagcttccttcgatcctgcaggtccacagtcttgctcatgcgggccttcgcatgggctgtggccagtcgaatcagagtttccagtgttcgggctgtaactggagatggaattccggatcaagaagatcatgcagacggacgaagagattgggaaggtggcggcggcggtgcctgtcatcatctcccgggcgctcgagctcttcctagagtcgctgttgaagaaggcctgccaggtgacccagtcgcggaacgcgaagaccatgaccacatcccacctgaagcagtgcatcgagctggagcagcagtttgacttcttgaaggacctggtggcatctgttcccgacatgcagggggacggggaagacaaccacatggatggggacaagggcgcccgcaggggccggaagccaggcagcggcggccggaagaacggtgggatgggaacgaaaagcaaggacaagaagctgtccgggacagactcggagcaggaggatgaatctgaggacacagatactgatggggaagaggagacatcacaacccccaccccaggccagccacccctctgcccactttcagagccccccgacacccttcctgcccttcgcctctactctgcctttgcccccagcgcccccgggcccctcagcacctgatgaagaggacgaagaagattacgactcctagcgccttctgccccccagaccatagccccttttagttggtttttcattcccgttgttatggagggccacatctgccagagcctggagtctgcgaaggccgggaccggttccccggcccacag

SEQ ID NO: 296 - DNA, 1002 bp, Homo sapiens
gggcgggagcggcggtccagactggggagggacgcgcaccggccaggaggcttcaagaggagggcactagggccctgcgagcggcgtcttaaccggcggcgctaggactccgcgggaaacggcgggggcggagcgggcggcaccaggacccaggggaaccgcgacgggcgggcggcgagcaggcccgggagccgggaggctgcgggcggcggcgctggacccgacgcggcgagagaggccccgagatgccgagcaagaagaagaagtacaacgcgcggttcccgccggcgcggatcaagaagatcatgcagacggacgaagagattgggaaggtggcggcggcggtgcctgtcatcatctcccgggcgctcgagctcttcctagagtcgctgttgaagaaggcctgccaggtgacccagtcgcggaacgcgaagaccatgaccacatcccacctgaagcagtgcatcgagctggagcagcagtttgacttcttgaaggacctggtggcatctgttcccgacatgcagggggacggggaagacaaccacatggatggggacaagggcgcccgcaggggccggaagccaggcagcggcggccggaagaacggtgggatgggaacgaaaagcaaggacaagaagctgtccgggacagactcggagcaggaggatgaatctgaggacacagatactgatggggaagaggagacatcacaacccccaccccaggccagccacccctctgcccactttcagagccccccgacacccttcctgcccttcgcctctactctgcctttgcccccagcgcccccgggcccctcagcacctgatgaagaggacgaagaagattacgactcctagcgccttctgccccccagaccatagccccttttagttggttttagttgctctggggggaggagagaaggtagagctgttcttaaatttattaaaaaaaaaaataaaagggaatctcagtgtctgttccaggctctgcgca

SEQ ID NO: 297 - DNA, 3759 bp, Homo sapiens
agggccccctgccactgagagatgacaatggcattgttctgctgggtgagagagctgccaagtgccgagcatatgccaaagcactacactacaaagaactggagttccagaaaggccccacccctgccattctagaatctctcatcagcattaataataagctacagcagccggaggcagcggccggagtgttagaatatgccatgaaacactttggagagctggagatccaggctacctggtatgagaaactgcacgagtgggaggatgcccttgtggcctatgacaagaaaatggacaccaacaaggacgacccagagctgatgctgggccgcatgcgctgcctcgaggccttgggggaatggggtcaactccaccagcagtgctgtgaaaagtggaccctggttaatgatgagacccaagccaagatggcccggatggctgctgcagctgcatggggtttaggtcagtgggacagcatggaagaatacacctgtatgatccctcgggacacccatgatggggcattttatagagctgtgctggcactgcatcaggacctcttctccttggcacaacagtgcattgacaaggccagggacctgctggatgctgaattaactgcgatggcaggagagagttacagtcgggcatatggggccatggtttcttgccacatgctgtccgagctggaggaggttatccagtacaaacttgtccccgagcgacgagagatcatccgccagatctggtgggagagactgcagggctgccagcgtatcgtagaggactggcagaaaatccttatggtgcggtcccttgtggtcagccctcatgaagacatgagaacctggctcaagtatgcaagcctgtgcggcaagagtggcaggctggctcttgctcataaaactttagtgttgctcctgggagttgatccgtctcggcaacttgaccatcctctgccaacagttcaccctcaggtgacctatgcctacatgaaaaacatgtggaagagtgcccgcaagatcgatgccttccagcacatgcagcattttgtccagaccatgcagcaacaggcccagcatgccatcgctactgaggaccagcagcataagcaggaactgcacaagctcatggcccgatgcttcctgaaacttggagagtggcagctgaatctacagggcatcaatgagagcacaatccccaaagtgctgcagtactacagcgccgccacagagcacgaccgcagctggtacaaggcctggcatgcgtgggcagtgatgaacttcgaagctgtgctacactacaaacatcagaaccaagcccgcgatgagaagaagaaactgcgtcatgccagcggggccaacatcaccaacgccaccactgccgccaccacggccgccactgccaccaccactgccagcaccgagggcagcaacagtgagagcgaggccgagagcaccgagaacagccccaccccatcgccgctgcagaagaaggtcactgaggatctgtccaaaaccctcctgatgtacacggtgcctgccgtccagggcttcttccgttccatctccttgtcacgaggcaacaacctccaggatacactcagagttctcaccttatggtttgattatggtcactggccagatgtcaatgaggccttagtggagggggtgaaagccatccagattgatacctggctacaggttatacctcagctcattgcaagaattgatacgcccagacccttggtgggacgtctcattcaccagcttctcacagacattggtcggtaccacccccaggccctcatctacccactgacagtggcttctaagtctaccacgacagcccggcacaatgcagccaacaagattctgaagaacatgtgtgagcacagcaacaccctggtccagcaggccatgatggtgagcgaggagctgatccgagtggccatcctctggcatgagatgtggcatgaaggcctggaagaggcatctcgtttgtactttggggaaaggaacgtgaaaggcatgtttgaggtgctggagcccttgcatgctatgatggaacggggcccccagactctgaaggaaacatcctttaatcaggcctatggtcgagatttaatggaggcccaagagtggtgcaggaagtacatgaaatcagggaatgtcaaggacctcacccaagcctgggacctctattatcatgtgttccgacgaatctcaaagcagctgcctcagctcacatccttagagctgcaatatgtttccccaaaacttctgatgtgccgggaccttgaattggctgtgccaggaacatatgaccccaaccagccaatcattcgcattcagtccatagcaccgtctttgcaagtcatcacatccaagcagaggccccggaaattgacacttatgggcagcaacggacatgagtttgttttccttctaaaaggccatgaagatctgcgccaggatgagcgtgtgatgcagctcttcggcctggttaacacccttctggccaatgacccaacatctcttcggaaaaacctcagcatccagagatacgctgtcatccctttatcgaccaactcgggcctcattggctgggttccccactgtgacacactgcacgccctcatccgggactacagggagaagaagaagatccttctcaacatcgagcatcgcatcatgttgcggatggctccggactatgaccacttgactctgatgcagaaggtggaggtgtttgagcatgccgtcaataatacagctggggacgacctggccaagctgctgtggctgaaaagccccagctccgaggtgtggtttgaccgaagaaccaattatacccgttctttagcggtcatgtcaatggttgggtatattttaggcctgggagatagacacccatccaacctgatgctggaccgtctgagtgggaagatcctgcacattgactttggggactgctttgaggttgctatgacccgagagaagtttccagagaagattccatttagactaacaagaatgttgaccaatgctatggaggttacaggcctggatggcaactacagaatcacatgccacacagtgatggaggtgctgcgagagcacaaggacagtgtcatggccgtgctggaagcctttgtctatgaccccttgctgaactggaggctgatggacacaaataccaaaggcaacaagcgatcccgaacgaggacggattcctactctgctggccagtcagtcgaaattttggacggtgtggaacttggagagccagcccataagaaaacggggaccacagtgccagaatctattcattctttcattggagacggtttggtgaaaccagaggccctaaataagaaagctatccagattattaacagggttcgagataagctcactggtcgggacttctctcatgatgacactttggatgttccaacgcaagttgagctgctcatcaaacaagcgacatcccatgaaaacctctgccagtgctatattggctggtgccctttctggtaactggaggcccagatgtgcccatcacgttttttctgaggcttttgtactttagtaaatgcttccactaaactgaaaccatggtgagaaagtttgactttgttaaatattttgaaatgtaaatgaaaagaactactgtatattaaaagttggtttgaaccaactttctagctgctgttgaagaatatattgtcagaaacacaaggcttgatttggt

SEQ ID NO: 298 - DNA, 8702 bp, Homo sapiens
gcggggaaggcgggcggtggggcagggggcctgaagcggcggtaccggtgctggcggcggcagctgaggccttggccgaagccgcgcgaacctcagggcaagatgcttggaaccggacctgccgccgccaccaccgctgccaccacatctagcaatgtgagcgtcctgcagcagtttgccagtggcctaaagagccggaatgaggaaaccagggccaaagccgccaaggagctccagcactatgtcaccatggaactccgagagatgagtcaagaggagtctactcgcttctatgaccaactgaaccatcacatttttgaattggtttccagctcagatgccaatgagaggaaaggtggcatcttggccatagctagcctcataggagtggaaggtgggaatgccacccgaattggcagatttgccaactatcttcggaacctcctcccctccaatgacccagttgtcatggaaatggcatccaaggccattggccgtcttgccatggcaggggacacttttaccgctgagtacgtggaatttgaggtgaagcgagccctggaatggctgggtgctgaccgcaatgagggccggagacatgcagctgtcctggttctccgtgagctggccatcagcgtccctaccttcttcttccagcaagtgcaacccttctttgacaacatttttgtggccgtgtgggaccccaaacaggccatccgtgagggagctgtagccgcccttcgtgcctgtctgattctcacaacccagcgtgagccgaaggagatgcagaagcctcagtggtacaggcacacatttgaagaagcagagaagggatttgatgagaccttggccaaagagaagggcatgaatcgggatgatcggatccatggagccttgttgatccttaacgagctggtccgaatcagcagcatggagggagagcgtctgagagaagaaatggaagaaatcacacagcagcagctggtacacgacaagtactgcaaagatctcatgggcttcggaacaaaacctcgtcacattacccccttcaccagtttccaggctgtacagccccagcagtcaaatgccttggtggggctgctggggtacagctctcaccaaggcctcatgggatttgggacctcccccagtccagctaagtccaccctggtggagagccggtgttgcagagacttgatggaggagaaatttgatcaggtgtgccagtgggtgctgaaatgcaggaatagcaagaactcgctgatccaaatgacaatccttaatttgttgccccgcttggctgcattccgaccttctgccttcacagatacccagtatctccaagataccatgaaccatgtcctaagctgtgtcaagaaggagaaggaacgtacagcggccttccaagccctggggctactttctgtggctgtgaggtctgagtttaaggtctatttgcctcgcgtgctggacatcatccgagcggccctgcccccaaaggacttcgcccataagaggcagaaggcaatgcaggtggatgccacagtcttcacttgcatcagcatgctggctcgagcaatggggccaggcatccagcaggatatcaaggagctgctggagcccatgctggcagtgggactaagccctgccctcactgcagtgctctacgacctgagccgtcagattccacagctaaagaaggacattcaagatgggctactgaaaatgctgtccctggtccttatgcacaaaccccttcgccacccaggcatgcccaagggcctggcccatcagctggcctctcctggcctcacgaccctccctgaggccagcgatgtgggcagcatcactcttgccctccgaacgcttggcagctttgaatttgaaggccactctctgacccaatttgttcgccactgtgcggatcatttcctgaacagtgagcacaaggagatccgcatggaggctgcccgcacctgctcccgcctgctcacaccctccatccacctcatcagtggccatgctcatgtggttagccagaccgcagtgcaagtggtggcagatgtgcttagcaaactgctcgtagttgggataacagatcctgaccctgacattcgctactgtgtcttggcgtccctggacgagcgctttgatgcacacctggcccaggcggagaacttgcaggccttgtttgtggctctgaatgaccaggtgtttgagatccgggagctggccatctgcactgtgggccgactcagtagcatgaaccctgcctttgtcatgcctttcctgcgcaagatgctcatccagattttgacagagttggagcacagtgggattggaagaatcaaagagcagagtgcccgcatgctggggcacctggtctccaatgccccccgactcatccgcccctacatggagcctattctgaaggcattaattttgaaactgaaagatccagaccctgatccaaacccaggtgtgatcaataatgtcctggcaacaataggagaattggcacaggttagtggcctggaaatgaggaaatgggttgatgaactttttattatcatcatggacatgctccaggattcctctttgttggccaaaaggcaggtggctctgtggaccctgggacagttggtggccagcactggctatgtagtagagccctacaggaagtaccctactttgcttgaggtgctactgaattttctgaagactgagcagaaccagggtacacgcagagaggccatccgtgtgttagggcttttaggggctttggatccttacaagcacaaagtgaacattggcatgatagaccagtcccgggatgcctctgctgtcagcctgtcagaatccaagtcaagtcaggattcctctgactatagcactagtgaaatgctggtcaacatgggaaacttgcctctggatgagttctacccagctgtgtccatggtggccctgatgcggatcttccgagaccagtcactctctcatcatcacaccatggttgtccaggccatcaccttcatcttcaagtccctgggactcaaatgtgtgcagttcctgccccaggtcatgcccacgttccttaacgtcattcgagtctgtgatggggccatccgggaatttttgttccagcagctgggaatgttggtgtcctttgtgaagagccacatcagaccttatatggatgaaatagtcaccctcatgagagaattctgggtcatgaacacctcaattcagagcacgatcattcttctcattgagcaaattgtggtagctcttgggggtgaatttaagctctacctgccccagctgatcccacacatgctgcgtgtcttcatgcatgacaacagcccaggccgcattgtctctatcaagttactggctgcaatccagctgtttggcgccaacctggatgactacctgcatttactgctgcctcctattgttaagttgtttgatgcccctgaagctccactgccatctcgaaaggcagcgctagagactgtggaccgcctgacggagtccctggatttcactgactatgcctcccggatcattcaccctattgttcgaacactggaccagagcccagaactgcgctccacagccatggacacgctgtcttcacttgtttttcagctggggaagaagtaccaaattttcattccaatggtgaataaagttctggtgcgacaccgaatcaatcatcagcgctatgatgtgctcatctgcagaattgtcaagggatacacacttgctgatgaagaggaggatcctttgatttaccagcatcggatgcttaggagtggccaaggggatgcattggctagtggaccagtggaaacaggacccatgaagaaactgcacgtcagcaccatcaacctccaaaaggcctggggcgctgccaggagggtctccaaagatgactggctggaatggctgagacggctgagcctggagctgctgaaggactcatcatcgccctccctgcgctcctgctgggccctggcacaggcctacaacccgatggccagggatctcttcaatgctgcatttgtgtcctgctggtctgaactgaatgaagatcaacaggatgagctcatcagaagcatcgagttggccctcacctcacaagacatcgctgaagtcacacagaccctcttaaacttggctgaattcatggaacacagtgacaagggccccctgccactgagagatgacaatggcattgttctgctgggtgagagagctgccaagtgccgagcatatgccaaagcactacactacaaagaactggagttccagaaaggccccacccctgccattctagaatctctcatcagcattaataataagctacagcagccggaggcagcggccggagtgttagaatatgccatgaaacactttggagagctggagatccaggctacctggtatgagaaactgcacgagtgggaggatgcccttgtggcctatgacaagaaaatggacaccaacaaggacgacccagagctgatgctgggccgcatgcgctgcctcgaggccttgggggaatggggtcaactccaccagcagtgctgtgaaaagtggaccctggttaatgatgagacccaagccaagatggcccggatggctgctgcagctgcatggggtttaggtcagtgggacagcatggaagaatacacctgtatgatccctcgggacacccatgatggggcattttatagagctgtgctggcactgcatcaggacctcttctccttggcacaacagtgcattgacaaggccagggacctgctggatgctgaattaactgcgatggcaggagagagttacagtcgggcatatggggccatggtttcttgccacatgctgtccgagctggaggaggttatccagtacaaacttgtccccgagcgacgagagatcatccgccagatctggtgggagagactgcagggctgccagcgtatcgtagaggactggcagaaaatccttatggtgcggtcccttgtggtcagccctcatgaagacatgagaacctggctcaagtatgcaagcctgtgcggcaagagtggcaggctggctcttgctcataaaactttagtgttgctcctgggagttgatccgtctcggcaacttgaccatcctctgccaacagttcaccctcaggtgacctatgcctacatgaaaaacatgtggaagagtgcccgcaagatcgatgccttccagcacatgcagcattttgtccagaccatgcagcaacaggcccagcatgccatcgctactgaggaccagcagcataagcaggaactgcacaagctcatggcccgatgcttcctgaaacttggagagtggcagctgaatctacagggcatcaatgagagcacaatccccaaagtgctgcagtactacagcgccgccacagagcacgaccgcagctggtacaaggcctggcatgcgtgggcagtgatgaacttcgaagctgtgctacactacaaacatcagaaccaagcccgcgatgagaagaagaaactgcgtcatgccagcggggccaacatcaccaacgccaccactgccgccaccacggccgccactgccaccaccactgccagcaccgagggcagcaacagtgagagcgaggccgagagcaccgagaacagccccaccccatcgccgctgcagaagaaggtcactgaggatctgtccaaaaccctcctgatgtacacggtgcctgccgtccagggcttcttccgttccatctccttgtcacgaggcaacaacctccaggatacactcagagttctcaccttatggtttgattatggtcactggccagatgtcaatgaggccttagtggagggggtgaaagccatccagattgatacctggctacaggttatacctcagctcattgcaagaattgatacgcccagacccttggtgggacgtctcattcaccagcttctcacagacattggtcggtaccacccccaggccctcatctacccactgacagtggcttctaagtctaccacgacagcccggcacaatgcagccaacaagattctgaagaacatgtgtgagcacagcaacaccctggtccagcaggccatgatggtgagcgaggagctgatccgagtggccatcctctggcatgagatgtggcatgaaggcctggaagaggcatctcgtttgtactttggggaaaggaacgtgaaaggcatgtttgaggtgctggagcccttgcatgctatgatggaacggggcccccagactctgaaggaaacatcctttaatcaggcctatggtcgagatttaatggaggcccaagagtggtgcaggaagtacatgaaatcagggaatgtcaaggacctcacccaagcctgggacctctattatcatgtgttccgacgaatctcaaagcagctgcctcagctcacatccttagagctgcaatatgtttccccaaaacttctgatgtgccgggaccttgaattggctgtgccaggaacatatgaccccaaccagccaatcattcgcattcagtccatagcaccgtctttgcaagtcatcacatccaagcagaggccccggaaattgacacttatgggcagcaacggacatgagtttgttttccttctaaaaggccatgaagatctgcgccaggatgagcgtgtgatgcagctcttcggcctggttaacacccttctggccaatgacccaacatctcttcggaaaaacctcagcatccagagatacgctgtcatccctttatcgaccaactcgggcctcattggctgggttccccactgtgacacactgcacgccctcatccgggactacagggagaagaagaagatccttctcaacatcgagcatcgcatcatgttgcggatggctccggactatgaccacttgactctgatgcagaaggtggaggtgtttgagcatgccgtcaataatacagctggggacgacctggccaagctgctgtggctgaaaagccccagctccgaggtgtggtttgaccgaagaaccaattatacccgttctttagcggtcatgtcaatggttgggtatattttaggcctgggagatagacacccatccaacctgatgctggaccgtctgagtgggaagatcctgcacattgactttggggactgctttgaggttgctatgacccgagagaagtttccagagaagattccatttagactaacaagaatgttgaccaatgctatggaggttacaggcctggatggcaactacagaatcacatgccacacagtgatggaggtgctgcgagagcacaaggacagtgtcatggccgtgctggaagcctttgtctatgaccccttgctgaactggaggctgatggacacaaataccaaaggcaacaagcgatcccgaacgaggacggattcctactctgctggccagtcagtcgaaattttggacggtgtggaacttggagagccagcccataagaaaacggggaccacagtgccagaatctattcattctttcattggagacggtttggtgaaaccagaggccctaaataagaaagctatccagattattaacagggttcgagataagctcactggtcgggacttctctcatgatgacactttggatgttccaacgcaagttgagctgctcatcaaacaagcgacatcccatgaaaacctctgccagtgctatattggctggtgccctttctggtaactggaggcccagatgtgcccatcacgttttttctgaggcttttgtactttagtaaatgcttccactaaactgaaaccatggtgagaaagtttgactttgttaaatattttgaaatgtaaatgaaaagaactactgtatattaaaagttggtttgaaccaactttctagctgctgttgaagaatatattgtcagaaacacaaggcttgatttggttcccaggacagtgaaacatagtaataccacgtaaatcaagccattcattttggggaacagaagatccataactttagaaatacgggttttgacttaactcacaagagaactcatcataagtacttgctgatggaagaatgacctagttgctcctctcaacatgggtacagcaaactcagcacagccaagaagcctcaggtcgtggagaacatggattaggatcctagactgtaaagacacagaagatgctgacctcacccctgccacctatcccaagacctcactggtctgtggacagcagcagaaatgtttgcaagataggccaaaatgagtacaaaaggtctgtcttccatcagacccagtgatgctgcgactcacacgcttcaattcaagacctgaccgctagtagggaggtttattcagatcgctggcagcctcggctgagcagatgcacagaggggatcactgtgcagtgggaccaccctcactggccttctgcagcagggttctgggatgttttcagtggtcaaaatactctgtttagagcaagggctcagaaaacagaaatactgtcatggaggtgctgaacacagggaaggtctggtacatattggaaattatgagcagaacaaatactcaactaaatgcacaaagtataaagtgtagccatgtctagacaccatgttgtatcagaataatttttgtgccaataaatgacatcagaattttaaacata

SEQ ID NO: 299 - DNA, 1240 bp, Homo sapiens
gatcatgccactgtactccagcctgggtgacagagcaagaccctatcttaaaaaaaagaaaaaatcctggatcagagaaagtgttatctacacattatatgatctaaggaaaaatattggtagaaaatgaggcaagcataataaccttgcctttcaattttctttgggcatctgattgcattttatccttaagagcccagaaacccagattcttagttaagctcaaacaaagccaaaagacaaagtaaggctggcacccctttcacagagcttctctacatttgaaaatgatttggagagttctgaaaagttcctcaactttttataaccctaaggtagccagccttcctcttggacaaaactcataaggtatctgtgttcgcttggttgtgagaatacataggatattccaaggggaaaaaaaacaagaagagtctaaatgtgtaggtcaagaaagaggcagagatgaaaaagaaatacaggaataaaaagaaatttgttagtgctgaagagacgaatattgaaaaagaaagtgagaaagaaggatgaaggaatgattcaaatatggaatataaggaggctgaggcaggataattgcttgaactcaggaggcggaggttgcagtgagccaagatcacatcattgcactccagcctgggtgacaggagcaaaactctgtcttaaaaaaaaaaaacaaaaaacaaagaagaagaagatagccagagagagagaaacagcatctataatgtgcattaaaacacaccaaggaggagacggaacttttcggtaagaaagaacccaaggaacaaaggggagctgggaccagatcgtgagaggagggaaaataggctaatggaagaaaggcaatacatgagctggggccaacacttccagggagcagcaagagctctcaccagtgtagtcataacatttggaatgagggtgtgagcaactgcaaattcccatctcccttctcattccagcctcattgtaacacacattctacgcctagcctggctttcttgctctccctcatctcattgtttcagcggaggccaaatctgaagtcctttccagggagtggctctgttcatcttattcgccagccaaagtaggaacagcgtaagaggagagagacacattcagcagccaaaggactcggtggaaagagcagaacaccatagacagtgagttatttgattacctgaaaccctaaagagacagagggaatgtgtgtatg

SEQ ID NO: 300 - DNA, 1119 bp, Homo sapiens
attccagcctcattgtaacacacattctacgcctagcctggctttcttgctctccctcatctcattgtttcagcggaggccaaatctgaagtcctttccagggagtggctctgttcatcttattcgccagccaaagtaggaacagcgtaagaggagagagacacattcagcagccaaaggactcggtggaaagagcagaacaccatagacaatatgtcgctcttgggacccaaggtgctgctgtttcttgctgcattcatcatcacctctgactggatacccctgggggtcaatagtcaacgaggagacgatgtgactcaagcgactccagaaacattcacagaagatcctaatctggtgaatgatcccgctacagatgaaacagttttggctgttttggctgatattgcaccttccacagatgacttggcctccctcagtgaaaaaaataccactgcagagtgctgggatgagaaatttacctgcacaaggctctactctgtgcatcggccggttaaacaatgcattcatcagttatgcttcaccagtttacgacgtatgtacatcgtcaacaaggagatctgctctcgtcttgtctgtaaggaacacgaagctatgaaagatgagctttgccgtcagatggctggtctgccccctaggagactccgtcgctccaattacttccgacttcctccctgtgaaaatgtggatttgcagagacccaatggtctgtgatcattgaaaaagaggaaagaagaaaaaatgtatgggtgagaggaaggaggatctccttcttctccaaccattgacagctaacccttagacagtatttcttaaaccaatccttttgcaatgtccagcttttacccctactctctactttttcacccaaactgataacatttatctcattttctagcacttaaaatacaaagtctatattattgcataattttgctgcttctcaatatcatagacacagtgaatagatgatgactatatggcttatatacaaacattctatgtacaatttcaagggagactaaactttaggctaataatctttactattgaatctgtctgatatagatcttagggttgaagaagctatctttgtct

SEQ ID NO: 301 - DNA, 1449 bp, Homo sapiens
ctggatagaacagctcaagccttgccacttcgggcttctcactgcagctgggcttggacttcggagttttgccattgccagtgggacgtctgagactttctccttcaagtacttggcagatcactctcttagcagggtctgcgcttcgcagccgggatgaagctggtttccgtcgccctgatgtacctgggttcgctcgccttcctaggcgctgacaccgctcggttggatgtcgcgtcggagtttcgaaagaagtggaataagtgggctctgagtcgtgggaagagggaactgcggatgtccagcagctaccccaccgggctcgctgacgtgaaggccgggcctgcccagacccttattcggccccaggacatgaagggtgcctctcgaagccccgaagacagcagtccggatgccgcccgcatccgagtcaagcgctaccgccagagcatgaacaacttccagggcctccggagctttggctgccgcttcgggacgtgcacggtgcagaagctggcacaccagatctaccagttcacagataaggacaaggacaacgtcgcccccaggagcaagatcagcccccagggctacggccgccggcgccggcgctccctgcccgaggccggcccgggtcggactctggtgtcttctaagccacaagcacacggggctccagcccccccgagtggaagtgctccccactttctttaggatttaggcgcccatggtacaaggaatagtcgcgcaagcatcccgctggtgcctcccgggacgaaggacttcccgagcggtgtggggaccgggctctgacagccctgcggagaccctgagtccgggaggcaccgtccggcggcgagctctggctttgcaagggcccctccttctgggggcttcgcttccttagccttgctcaggtgcaagtgccccagggggcggggtgcagaagaatccgagtgtttgccaggcttaaggagaggagaaactgagaaatgaatgctgagacccccggagcaggggtctgagccacagccgtgctcgcccacaaactgatttctcacggcgtgtcaccccaccagggcgcaagcctcactattacttgaactttccaaaacctaaagaggaaaagtgcaatgcgtgttgtacatacagaggtaactatcaatatttaagtttgttgctgtcaagattttttttgtaacttcaaatatagagatatttttgtacgttatatattgtattaagggcattttaaaagcaattatattgtcctcccctattttaagacgtgaatgtctcagcgaggtgtaaagttgttcgccgcgtggaatgtgagtgtgtttgtgtgcatgaaagagaaagactgattacctcctgtgtggaagaaggaaacaccgagtctctgtataatctatttacataaaatgggtgatatgcgaacagcaaacc

SEQ ID NO: 302 - DNA, 1450 bp, Homo sapiens
ctggatagaacagctcaagccttgccacttcgggcttctcactgcagctgggcttggacttcggagttttgccattgccagtgggacgtctgagactttctccttcaagtacttggcagatcactctcttagcagggtctgcgcttcgcagccgggatgaagctggtttccgtcgccctgatgtacctgggttcgctcgccttcctaggcgctgacaccgctcggttggatgtcgcgtcggagtttcgaaagaagtggaataagtgggctctgagtcgtgggaagagggaactgcggatgtccagcagctaccccaccgggctcgctgacgtgaaggccgggcctgcccagacccttattcggccccaggacatgaagggtgcctctcgaagccccgaagacagcagtccggatgccgcccgcatccgagtcaagcgctaccgccagagcatgaacaacttccagggcctccggagctttggctgccgcttcgggacgtgcacggtgcagaagctggcacaccagatctaccagttcacagataaggacaaggacaacgtcgcccccaggagcaagatcagcccccagggctacggccgccggcgccggcgctccctgcccgaggccggcccgggtcggactctggtgtcttctaagccacaagcacacggggctccagcccccccgagtggaagtgctccccactttctttaggatttaggcgcccatggtacaaggaatagtcgcgcaagcatcccgctggtgcctcccgggacgaaggacttcccgagcggtgtggggaccgggctctgacagccctgcggagaccctgagtccgggaggcaccgtccggcggcgagctctggctttgcaagggcccctccttctgggggcttcgcttccttagccttgctcaggtgcaagtgccccagggggcggggtgcagaagaatccgagtgtttgccaggcttaaggagaggagaaactgagaaatgaatgctgagacccccggagcaggggtctgagccacagccgtgctcgcccacaaactgatttctcacggcgtgtcaccccaccagggcgcaagcctcactattacttgaactttccaaaacctaaagaggaaaagtgcaatgcgtgttgtacatacagaggtaactatcaatatttaagtttgttgctgtcaagattttttttgtaacttcaaatatagagatatttttgtacgttatatattgtattaagggcattttaaaagcaattatattgtcctccccctattttaagacgtgaatgtctcagcgaggtgtaaagttgttcgccgcgtggaatgtgagtgtgtttgtgtgcatgaaagagaaagactgattacctcctgtgtggaagaaggaaacaccgagtctctgtataatctatttacataaaatgggtgatatgcgaacagcaaacc

SEQ ID NO: 303 - DNA, 956 bp, Homo sapiens
gagagagagagacttaagtctaaggcactgagcgtatcatgttaaagatgagcgggtggcagcgacagagccaaaatcagagctggaacctgaggagagagtgttcaagaaggaagtgtatcttcatacatcaccacacctgaaagcagatgtgcttttccagactgatccaactgcagagatggcagctgagtcattgcctttctcctttgggacactgtccagctgggagctggaagcctggtatgaggacctgcaagaggtcctgtcttcagatgaaaatgggggtacctatgtttcacctcctggaaatgaagaggaagaatcaaaaatcttcaccactcttgaccctgcttctctggcttggctgactgaggaggagccagaaccagcagaggtcacaagcacctcccagagccctcactctccagattccagtcagagctccctggctcaggaggaagaggaggaagaccaagggagaaccaggaaacggaaacagagtggtcattccccagcccgggctggaaagcagcgcatgaaggagaaagaacaggagaatgaaaggaaagtggcacagctagctgaagagaatgaacggctcaagcaggaaatcgagcgcctgaccagggaagtagaggcgactcgccgagctctgattgaccgaatggtgaatctgcaccaagcatgaacaattgggagcatcagtcccccacttgggccacactacccacctttcccagaagtggctactgactaccctctcactagtgccaatgatgtgaccctcaatcccacatacgcagggggaaggcttggagtagacaaaaggaaaggtctcagcttgtatatagagattgtacatttatttattactgtccctatctattaaagtgactttctatgaaaaaaaaaaaaaaaaaaaaaaaaaaaaaaaaaaaaaaaaaaaaaaaaaa

SEQ ID NO: 304 - DNA, 1426 bp, Homo sapiens
cggagcgggagcggtgcaggctgaggtctccgagcggctcgccatggctggcccgcagcagcagcccccttacctgcacctggccgagctgacggcgtcccagttcctggaaatatggaagcactttgacgcagacggaaatgggtatattgaaggtaaagagctagaaaactttttccaagagctggagaaggcaaggaaaggctctggcatgatgtcaaagagtgacaactttggagaaaagatgaaggagttcatgcagaagtatgataaaaactcagatgggaaaatcgagatggcagagctggcgcagatcctgccaaccgaagagaacttccttctgtgcttcaggcagcacgtgggctccagcgccgagtttatggaggcttggcggaagtacgacacagacaggagtggctacatcgaagccaatgagctcaagggattcctgtcagacctgctgaagaaggcgaaccggccgtacgatgagcccaagctccaggaatacacccaaaccatactacggatgtttgacttgaacggggatggcaaattgggcctctcagagatgtcccgactcctgcctgtccaggaaaacttcctgcttaaatttcagggcatgaagctgacctcagaggagtttaacgcgatcttcacattttacgacaaggatagaagcggctacattgacgagcatgagctggatgcccttttgaaggatctgtacgagaaaaacaaaaaggaaatcaatattcaacagctcaccaactacagaaagagcgtcatgtccttggcagaggcagggaagctctaccgcaaggacctggagattgtgctctgcagcgagccccccatgtaaagtggggacgggggctgcttctccacctcccccaaaccctgcttctgctgccctgatgcgtctacccagactcagagaccgtgagcgccccgcccccacccctacagcctgcacacacctgcctgcagagcaggaaacgagagatagaggatgggcagctggggggctgtcctgagccccctgcacccacccctgcccaggcagtctttgctcagtggatcacacacatggaaggtgatgggggcatgggtggagggtccctaattctcttcgctgtgatgcatgagctccctcgctgtatgatttaggcttctatgtccaacagagtggactcttccctctcgctcccctctgccggtcccccatgccaccacccaccccaaacttccaggttccatccaccaccttgccaatggtgtagctgtcctctcagaactcctgtgtgtggaaggcacccgccctttccttgccttctttactcggcgtgctccttttctctttgggtttcttgtttaccaaagaagagtttacagacaataaaatggaaaggtcctgctgtggaaactt

SEQ ID NO: 305 - DNA, 5041 bp, Homo sapiens
cgggctccggctgccatggaggaggaagaggaggcgataggcttgctggacaaggttctggaggacgaagatgtgtttctcctggaggagtgcgagctgggaaccccgaccagccccggctcagggtcccccttcctggtggctgtgaaggtggaagcagggaaaggcctggagatgaggaagctggttctctcggggttcttggccagcgaagagatctacattaaccagctggaagccctgttgctgcccatgaaacccctgaaggccaccgccaccacctcccagcccgtgctcaccatccagcagatcgagaccatcttctacaagatccaggacatctatgagatccacaaggagttctatgacaacctgtgccccaaggtgcaacagtgggacagccaggtcaccatgggccacctcttccagaagctggccagccagctcggtgtgtacaaagcgtttgtcgataactataaagtcgctctggagacagctgagaagtgcagccagtccaacaaccagttccagaagatctcagaggaactcaaagtgaaaggtcccaaggactccaaggacagccacacgtctgtcaccatggaagctctgctctacaagcccattgaccgggtcactcggagcaccctagtcctacacgacctgctgaagcacacacctgtggaccaccccgactacccgctgctgcaggatgccctccgcatctcccagaacttcctgtccagcatcaacgaggacatcgacccccgccggactgcagtgacaacgcccaagggggagacgcgacagctggtgaaggacggcttcctggtggaagtgtcagagagctcccggaagctgcggcacgtcttcctctttacagatgtcctactgtgtgccaagctgaagaagacctctgcaggaagcaccagcagtatgactgtaagtggtacatccccctggccgacctggtgtttccatcccccgaggaatctgaggccagcccccaggtgcaccccttcccagaccatgagctggaggacatgaagatgaagatctctgccctcaagagtgaaatccagaaggagaaagccaacaaaggccagagccgggccatcgagcgcctgaagaagaagatgtttgagaatgagttcctgctgctgctcaactcccccacaatcccgttcaggatccacaatcggaatggaaagagttacctgttcctactgtcctcggactacgagaggtcagagtggagagaagcaattcagaaactacagaagaaggatctccaggcctttgtcctgagctcagtggagctccaggtgctcacaggatcctgtttcaagcttaggactgtacacaacattcctgtcaccagcaataaagacgacgatgagtctccaggactctatggcttccttcatgtcatcgtccactctgccaagggatttaagcaatcagccaacctgtactgtaccctggaggtggattccttcggctattttgtcagcaaagccaaaaccagggtgttccgggacacagcggagcccaagtgggatgaggagtttgagatcgagctggagggctcccagtccctgaggatcctgtgctatgagaagtgctatgacaagaccaaggtcaacaaggacaacaatgagatcgtggacaagatcatgggcaaaggacagatccagctggacccacaaaccgtggagaccaagaactggcacacggacgtgattgagatgaacgggatcaaagtggaattttccatgaaattcaccagccgagatatgagcctgaagaggaccccgtccaaaaagcagaccggcgtcttcggtgtgaagatcagcgtggtgacgaagcgggagcgctccaaggtgccctacatcgtccggcagtgtgtggaggaggtggagaagaggggtatcgaggaggttggcatctacaggatatcgggcgtggccacggacatccaggcgctcaaggccgtcttcgatgccaataacaaggacatcctgctgatgctgagtgacatggacatcaacgccatcgccgggacgctcaagctgtacttccgggaactgcccgagccgctcctcacggaccgactctacccagccttcatggagggcatcgccctgtcagaccctgctgccaaggaaaactgcatgatgcacctgctccgctccctgcccgaccccaacctcatcaccttcctcttcctgctggaacacttgaaaagggttgccgagaaggagcccatcaacaaaatgtcacttcacaacctggctaccgtgtttggacccacgttactgagaccctcagaagtggagagcaaagcacacctcacctcggctgcggacatctggtcccatgacgtcatggcgcaggtccaggtcctcctctactacctgcagcacccccccatttccttcgcagaactcaagcggaacacactgtacttctccaccgacgtgtagcccgaggcagggtggctgcgggcgggtggtggaaccagcccctccagcctggggtccaactcagacttgaaagactgcaatagaaaactcccaaacccagcactccagactcgagggaagccagcttccaagaactggaatgcgtacgtcttttgtgccaccttgtacaaagccggctgcccagccccagcctcaccaccgcatcccacctcctgccctccatacctctagttgtgtctgatgctccgtgctgttcgggaattgttttatgtacacttgtcaggcagaaaaggtagtgaccggcccggcgtgggcacacagacagcccgctttgttctttcatttcctccagcactttctttccgcctgagtccagcccaaggccttttattttgcgctgtgtaactgctgccagcttctcttggccctgctcccagatggcggtctcctggcagcctcccctcagtcttcctccacccgctcttccttcccagcctgcctgcatgcatgtgcacccttggtcttcgctccatcgccttgaaagctctgaagaggccctgggttgccgcggcagcagtggtctgtttgatgctgccgtttgccgctgccggcccctcctcagactccgcctttgggagcacacctgctttgccttgctgcctgtgcaaatgttggacaagcagacacactcacactcgtccccagcttagcacagagctggagcgcccatttctggaattttccgtttgggaatctccacttctggggtttacctgttcggcctcctgcctatcagtgaggcatctctgactgtttcttctactgcttttcagttcccttccctgctgttctatttcctttgagtgtaaagactcacaggtgacctgctatcgagatagccagagggtcaggagagaatgggggaggaggcggtcaggctgctgaggaaacaccacaggctgaacgggggaggaatgcacatgccacgctgggtgtcccgggtcgcggggaggcagctcagctcttaggagcaagttgtgggggcttttcaagaggggccaggcttcctggagggtgactgatgtggccgaagcaggtgtccaggcaggtaggctgcagccaggagctccctggcaccgcaggacctcgtggtactcttgccttagattttacacacactccacagccaagcactgccacggtcctccaggacctgggaagcaaaggcacaggcccacggtggccagccattgtggtgctgccccagcttctggatacagccttttgggtaaacactgggaactccagaagttgtggggagagtggggaatcagacagccgcctctaggggctgggttctgctggggcctccttgttggtgctgtaggcacccgccagggagcagggacccgacttgcagacgcattgcccggtactaggaaggagtgaggtgtgttcccaccgtacacttcccacacgagctgcggctgccagcctcgggccatcagcctaggagagcagatgcagctccaggggctcgacttatagccagttacagctccccggctcttctgtgtggcagagcgtcgtttccgggccctcagggctggggagctcagttcccattgcttgtgctcagggctgagtcttaaagaagggtttgccggccctaacgctgcagcgcgtgcgcggagagaggccctttttgagcctgtttactcctgtggccttgggcagaacagtaaatactctgtgcacggaggaaagacatgcccaagaggaaggaagtactgaccatcggctgcctgtgagcagcttagcaaggagcccttgctccctgggaaaggcggtgaacttgagtctaaagatgcagtgcctggcccttcctaaggtccctgcctggcatccgagtgtcggtgtgtggcacagaaggctcctgcttgcttccaaagtgatggacaggaaggggcagagtgagtcacggcccagactgggcaccttcgcgtctcagcctcagggagccccacagccccaagctcgctgaggcaacgtgagaacaggctatgggaaggctgcaaaggctgagaaatgcaaaggctcatatttataaatcccacccccagagtggggagggtcaggtgccagacctggactaaactgcaccaaggaaacacccagcagggtctcctgtgagccggggaccatgcagcccgaaacctccagtcactgcgcccggcaggagtcaggagccagggactgtgcagcctggaacctccagtcactgtgcccagcagggtgggctgtgcccagcaggagtcaggctaagaaacgccaggtctgcctgttcttgctgggcaatggctgatggctgccagtttctgctgatacacaggtaggatgggacccttcatgaatatctgactttaataagttggtaaggatatatttttttgtctatgttctgtttcaacttatgtagattattataaattgatgtaaaccacgtgagaggaaaatgttaataaaaaatgcaaagccccatcatttgcacaaaactc

SEQ ID NO: 306 - DNA, 4592 bp, Homo sapiens
aggctgttgaggctgggccatctcctcctcacttccattctgactgcagtctgtggttctgattccataccagaggggctcaggatgctgttgctgggagctgttctactgctattagctctgcccggtcatgaccaggaaaccacgactcaagggcccggagtcctgcttcccctgcccaagggggcctgcacaggttggatggcgggcatcccagggcatccgggccataatggggccccaggccgtgatggcagagatggcacccctggtgagaagggtgagaaaggagatccaggtcttattggtcctaagggagacatcggtgaaaccggagtacccggggctgaaggtccccgaggctttccgggaatccaaggcaggaaaggagaacctggagaaggtgcctatgtataccgctcagcattcagtgtgggattggagacttacgttactatccccaacatgcccattcgctttaccaagatcttctacaatcagcaaaaccactatgatggctccactggtaaattccactgcaacattcctgggctgtactactttgcctaccacatcacagtctatatgaaggatgtgaaggtcagcctcttcaagaaggacaaggctatgctcttcacctatgatcagtaccaggaaaataatgtggaccaggcctccggctctgtgctcctgcatctggaggtgggcgaccaagtctggctccaggtgtatggggaaggagagcgtaatggactctatgctgataatgacaatgactccaccttcacaggctttcttctctaccatgacaccaactgatcaccactaactcagagcctcctccaggccaaacagccccaaagtcaattaaaggctttcagtacggttaggaagttgattattatttagttggaggcctttagatattattcattcatttactcattcatttattcattcattcatcaagtaactttaaaaaaatcatatgctatgttcccagtcctggggagcttcacaaacatgaccagataactgactagaaagaagtagttgacagtgctattttgtgcccactgtctctcctgatgctcatatcaatcctataaggcacagggaacaagcattctcctgtttttacagattgtatcctgaggctgagagagttaagtgaatgtctaaggtcacacagtattaagtgacagtgctagaaatcaaacccagagctgtggactttgttcactagactgtgcccttttatagaggtacatgttctctttggagtgttggtaggtgtctgtttcccacctcacctgagagccattgaatttgccttcctcatgaattaaaacctcccccaagcagagcttcctcagagaaagtggttctatgatgaagtcctgtcttggaaggactactactcaatggcccctgcactactctacttcctcttacctatgtcccttctcatgcctttccctccaacggggaaagccaactccatctctaagtgctgaactcatccctgttcctcaaggccacctggccaggagcttctctgatgtgatatccactttttttttttttgagatggagtctcactctgtcacccaggctggagtacagtgacacgacctcggctcactgcagcctccttctcctgggtccaagcaattattgtgcctcagcctcccgagtagctgagacttcaggtgcattccaccacacatggctaatttttgtatttttagtagaaatggggtttcgtcatgttggccaggctggtctcgaactcctggcctaggtgatccacccgcctcgacctcccaaagtgctgggattacaggcatgagccaccatgcccagtcgatatctcactttttattttgccatggatgagagtcctgggtgtgaggaacacctcccaccaggctagaggcaactgcccaggaaggactgtgcttccgtcacctctaaatcccttgcagatccttgataaatgcctcatgaagaccaatctcttgaatcccatatctacccagaattaactccattccagtctctgcatgtaatcagttttatccacagaaacattttcattttaggaaatccctggttttaagtatcaatccttgttcagctggacaatatgaatcttttccactgaagttagggatgactgtgattttcagaacacgtccagaatttttcatcaagaaggtagcttgagcctgaaatgcaaaacccatggaggaattctgaagccattgtctccttgagtaccaacagggtcagggaagactgggcctcctgaatttattattgttctttaagaattacaggttgaggtagttgatggtggtaaacattctctcaggagacaataactccagtgatgttcttcaaagattttagcaaaaacagagtaaatagcattctctatcaatatataaatttaaaaaactatctttttgcttacagttttaaattctgaacaattctctcttatatgtgtattgctaatcattaaggtattattttttccacatataaagctttgtctttttgttgttgttgttgtttttaagatggagtttccctctgttgccaggctagagtgcagtggcatgatctcggcttactgcaacctttgcctcccaggttcaagcgattcttctgcctcagcctcccgagtagctgggaccacaggtgcctaccaccatgccaggctaatttttgtatttttagtaaagacagggtttcaccatattggccaggctggtctcgaactcctgaccttgtgatctgcccgcctccatttttgttgttattttttgagaaagatagatatgaggtttagagagggatgaagaggtgagagtaagccttgtgttagtcagaactctgtgttgtgaatgtcattcacaacagaaaacccaaaatattatgcaaactactgtaagcaagaaaaataaaggaaaaatggaaacatttattcctttgcataatagaaattaccagagttgttctgtctttagataaggtttgaaccaaagctcaaaacaatcaagacccttttctgtatgtccttctgttctgccttccgcagtgtaggctttaccctcaggtgctacacagtatagttctagggtttccctcccgatatcaaaaagactgtggcctgcccagctctcgtatccccaagccacaccatctggctaaatggacatcatgttttctggtgatgcccaaagaggagagaggaagctctctttcccagatgccccagcaagtgtaaccttgcatctcattgctctggctgagttgtgtgcctgtttctgaccaatcactgagtcaggaggatgaaatattcatattgacttaattgcagcttaagttaggggtatgtagaggtattttccctaaagcaaaattgggacactgttatcagaaataggagagtggatgatagatgcaaaataatacctgtccacaacaaactcttaatgctgtgtttgagctttcatgagtttcccagagagacatagctggaaaattcctattgattttctctaaaatttcaacaagtagctaaagtctggctatgctcacagtctcacatctggttggggtgggctccttacagaacacgctttcacagttaccctaaactctctggggcagggttattcctttgtggaaccagaggcacagagagagtcaactgaggccaaaagaggcctgagagaaactgaggtcaagatttcaggattaatggtcctgtgatgctttgaagtacaattgtggatttgtccaattctctttagttctgtcagcttttgcttcatatattttagcgctctattattagatatatacatgtttagtattatgtcttattggtgcatttactctcttatcattatgtaatgtccttctttatctgtgataattttctgtgttctgaagtctactttgtctaaaaataacatacgcactcaacttccttttctttcttccttcctttctttcttccttcctttctttctctctctctctctttccttccttccttcctccttttctttctctctctctctctctctctttttttgacagactctcgttctgtggccctggctggagttcagtggtgtgatcttggctcactgctacctctaccatgagcaattctcctgcctcagcctcccaagtagctggaactacaggctcatgccactgcgcccagctaatttttgtatttttcgtagagacggggtttcaccacattcgtcaggttggtttcaaactcctgactttgtgatccacccgcctcggcctcccaaagtgctgggattacaggcatgagccatcacacctggtcaactttcttttgattagtgtttttgtggtatatctttttccatcatgttactttaaatatatctatattattgtatttaaaatgtgtttcttacagactgcatgtagttgggtataatttttatccagtctaaaaatatctgtcttttaattggtgtttagacaatttatatttaataaaattgttgaatttaaaaaaaaaaaaaaaa

SEQ ID NO: 307 - DNA, 4502 bp, Homo sapiens
ggctcaggatgctgttgctgggagctgttctactgctattagctctgcccggtcatgaccaggaaaccacgactcaagggcccggagtcctgcttcccctgcccaagggggcctgcacaggttggatggcgggcatcccagggcatccgggccataatggggccccaggccgtgatggcagagatggcacccctggtgagaagggtgagaaaggagatccaggtcttattggtcctaagggagacatcggtgaaaccggagtacccggggctgaaggtccccgaggctttccgggaatccaaggcaggaaaggagaacctggagaaggtgcctatgtataccgctcagcattcagtgtgggattggagacttacgttactatccccaacatgcccattcgctttaccaagatcttctacaatcagcaaaaccactatgatggctccactggtaaattccactgcaacattcctgggctgtactactttgcctaccacatcacagtctatatgaaggatgtgaaggtcagcctcttcaagaaggacaaggctatgctcttcacctatgatcagtaccaggaaaataatgtggaccaggcctccggctctgtgctcctgcatctggaggtgggcgaccaagtctggctccaggtgtatggggaaggagagcgtaatggactctatgctgataatgacaatgactccaccttcacaggctttcttctctaccatgacaccaactgatcaccactaactcagagcctcctccaggccaaacagccccaaagtcaattaaaggctttcagtacggttaggaagttgattattatttagttggaggcctttagatattattcattcatttactcattcatttattcattcattcatcgagtaactttaaaaaaatcatatgctatgttcccagtcctggggagcttcacaaacatgaccagataactgactagaaagaagtagttgacagtgctattttgtgcccactgtctctcctgatgctcatatcaatcctataaggcacagggaacaagcattctcctgtttttacagattgtatcctgaggctgagagagttaagtgaatgtctaaggtcacacagtattaagtgacagtgctagaaatcaaacccagagctgtggactttgttcactagactgtgcccttttatagaggtacatgttctctttggagtgttggtaggtgtctgtttcccacctcacctgagagccattgaatttgccttcctcatgaattaaaacctcccccaagcagagcttcctcagagaaagtggttctatgatgacgtcctgtcttggaaggactactactcaatggcccctgcactactctacttcctcttacctatgtcccttctcatgcctttccctccaacggggaaagccaactccatctctaagtgccgaactcatccctgttcctcaaggccacctggccaggagcttctctgatgtgatatccactttttttttttttgagatggagtctcactctgtcacccaggctggagtacagtgacacgacctcggctcactgcagcctccttctcctgggtccaagcaattattgtgcctcagcctcccgagtagctgagacttcaggtgcattccaccacacatggctaatttttgtatttttagtagaaatggggtttcgtcatgttggccaggctggtctcgaactcctggcctaggtgatccacccgcctcgacctcccaaagtgctgggattacaggcatgagccaccatgcccagtcgatatctcactttttattttgccatggatgagagtcctgggtgtgaggaacacctcccaccaggctagaggcaactgcccaggaaggactgtgcttccgtcacctctaaatcccttgcagatccttgataaatgcctcatgaagaccaatctcttgaatcccatatctacccagaattaactccattccagtctctgcatgtaatcagttttatccacagaaacattttcattttaggaaatccctggttttaagtatcaatccttgttcagctggacaatatgaatcttttccactgaagttagggatgactgtgattttcagaacacgtccagaatttttcatcaagaaggtagcttgagcctgaaatgcaaaacccatggaggaattctgaagccattgtctccttgagtaccaacagggtcagggaagactgggcctcctgaatttattattgttctttaagaattacaggttgaggtagttgatggtggtaaacattctctcaggagacaataactccagtgatgttcttcaaagattttagcaaaaacagagtaaatagcattctctatcaatatataaatttaaaaaactatctttttgcttacagttttaaattctgaacaattctctcttatatgtgtattgctaatcattaaggtattattttttccacatataaagctttgtctttttgttgttgttgttgtttttaagatggagtttccctctgttgccaggctagagtgcagtggcatgatctcggcttactgcaacctttgcctcccaggttcaagcgattcttctgcctcagcctcccgagtagctgggaccacaggtgcctaccaccatgccaggctaatttttgtatttttagtaaagacagggtttcaccatattggccaggctggtctcgaactcctgaccttgtgatctgcccgcctccatttttgttgttattttttgagaaagatagatatgaggtttagagagggatgaagaggtgagagtaagccttgtgttagtcagaactctgtgttgtgaatgtcattcacaacagaaaacccaaaatattatgcaaactactgtaagcaagaaaaataaaggaaaaatggaaacatttattcctttgcataatagaaattaccagagttgttctgtctttagataaggtttgaaccaaagctcaaaacaatcaagacccttttctgtatgtccttctgttctgccttccgcagtgtaggctttaccctcaggtgctacacagtatagttctagggtttccctcccgatatcaaaaagactgtggcctgcccagctctcgtatccccaagccacaccatctggctaaatggacatcatgttttctggtgatgcccaaagaggagagaggaagctctctttcccagatgccccagcaagtgtaaccttgcatctcattgctctggctgagttgtgtgcctgtttctgaccaatcactgagtcaggaggatgaaatattcatattgacttaattgcagcttaagttaggggtatgtagaggtattttccctaaagcaaaattgggacactgttatcagaaataggagagtggatgatagatgcaaaataatacctgtccacaacaaactcttaatgctgtgtttgagctttcatgagtttcccagagagacatagctggaaaattcctattgattttctctaaaatttcaacaagtagctaaagtctggctatgctcacagtctcacatctggttggggtgggctccttacagaacacgctttcacagttaccctaaactctctggggcagggttattcctttgtggaaccagaggcacagagagagtcaactgaggccaaaagaggcctgagagaaactgaggtcaagatttcaggattaatggtcctgtgatgctttgaagtacaattgtggatttgtccaattctctttagttctgtcagcttttgcttcatatattttagcgctctattattagatatatacatgtttagtattatgtcttattggtgcatttactctcttatcattatgtaatgtccttctttatctgtgataattttctgtgttctgaagtctactttgtctaaaaataacatacgcactcaacttccttttctttcttccttcctttctttcttccttcctttctttctctctctctctctttccttccttccttcctccttttctttctctctctctctctctctctttttttgacagactctcgttctgtggccctggctggagttcagtggtgtgatcttggctcactgctacctctaccatgagcaattctcctgcctcagcctcccaagtagctggaactacaggctcatgccactgcgcccagctaatttttgtatttttcgtagagacggggtttcaccacattcgtcaggttggtttcaaactcctgactttgtgatccacccgcctcggcctcccaaagtgctgggattacaggcatgagccatcacacctggtcaactttcttttgattagtgtttttgtggtatatctttttccatcatgttactttaaatatatctatattattgtatttaaaatgtgtttcttacagactgcatgtagttgggtataatttttatccagtctaaaaatatctgtcttttaattggtgtttagacaatttatatttaataaaattgttgaatttaa

SEQ ID NO: 308 - DNA, 4517 bp, Homo sapiens
ctgattccataccagaggggctcaggatgctgttgctgggagctgttctactgctattagctctgcccgggcatgaccaggaaaccacgactcaagggcccggagtcctgcttcccctgcccaagggggcctgcacaggttggatggcgggcatcccagggcatccgggccataatggggccccaggccgtgatggcagagatggcacccctggtgagaagggtgagaaaggagatccaggtcttattggtcctaagggagacatcggtgaaaccggagtacccggggctgaaggtccccgaggctttccgggaatccaaggcaggaaaggagaacctggagaaggtgcctatgtataccgctcagcattcagtgtgggattggagacttacgttactatccccaacatgcccattcgctttaccaagatcttctacaatcagcaaaaccactatgatggctccactggtaaattccactgcaacattcctgggctgtactactttgcctaccacatcacagtctatatgaaggatgtgaaggtcagcctcttcaagaaggacaaggctatgctcttcacctatgatcagtaccaggaaaataatgtggaccaggcctccggctctgtgctcctgcatctggaggtgggcgaccaagtctggctccaggtgtatggggaaggagagcgtaatggactctatgctgataatgacaatgactccaccttcacaggctttcttctctaccatgacaccaactgatcaccactaactcagagcctcctccaggccaaacagccccaaagtcaattaaaggctttcagtacggttaggaagttgattattatttagttggaggcctttagatattattcattcatttactcattcatttattcattcattcatcaagtaactttaaaaaaatcatatgctatgttcccagtcctggggagcttcacaaacatgaccagataactgactagaaagaagtagttgacagtgctattttgtgcccactgtctctcctgatgctcatatcaatcctataaggcacagggaacaagcattctcctgtttttacagattgtatcctgaggctgagagagttaagtgaatgtctaaggtcacacagtattaagtgacagtgctagaaatcaaacccagagctgtggactttgttcactagactgtgcccttttatagaggtacatgttctctttggagtgttggtaggtgtctgtttcccacctcacctgagagccattgaatttgccttcctcatgaattaaaacctcccccaagcagagcttcctcagagaaagtggttctatgatgaagtcctgtcttggaaggactactactcaatggcccctgcactactctacttcctcttacctatgtcccttctcatgcctttccctccaacggggaaagccaactccatctctaagtgctgaactcatccctgttcctcaaggccacctggccaggagcttctctgatgtgatatccacttttttttttttttgagatggagtctcactctgtcacccaggctggagtacagtgacacgacctcggctcactgcagcctccttctcctgggtccaagcaattattgtgcctcagcctcccgagtagctgagacttcaggtgcattccaccacacatggctaatttttgtatttttagtagaaatggggtttcgtcatgttggccaggctggtctcgaactcctggcctaggtgatccacccgcctcgacctcccaaagtgctgggattacaggcatgagccaccatgcccagtcgatatctcactttttattttgccatggatgagagtcctgggtgtgaggaacacctcccaccaggctagaggcaactgcccaggaaggactgtgcttccgtcacctctaaatcccttgcagatccttgataaatgcctcatgaagaccaatctcttgaatcccatatctacccagaattaactccattccagtctctgcatgtaatcagttttatccacagaaacattttcattttaggaaatccctggtttaagtatcaatccttgttcagctggacaatatgaatcttttccactgaagttagggatgactgtgattttcagaacacgtccagaatttttcatcaagaaggtagcttgagcctgaaatgcaaaacccatggaggaattctgaagccattgtctccttgagtaccaacagggtcagggaagactgggcctcctgaatttattattgttctttaagaattacaggttgaggtagttgatggtggtaaacattctctcaggagacaataactccagtgatgtttttcaaagattttagcaaaaacagagtaaatagcattctctatcaatatataaatttaaaaaactatctttttgcttacagttttaaattctgaacaatttctcttatatgtgtattgctaatcattaaggtattattttttccacatataaagctttgtctttttgttgttgttgttgtttttaagatggagtttccctctgttgccaggctagagtgcagtggcatgatctcggcttactgcaacctttgcctcccaggtttaagcgattcttctgcctcagcctcccgagtagctgggaccacaggtgcctaccaccatgccaggctaatttttgtatttttagtaaagacagggtttcaccatattggccaggctggtctcgaactcctgaccttgtgatctgcccgcctccattgtgttgttatttgtgagaaagatagatatgaggtttagagagggatgaagaggtgagagtaagccttgtgttagtcagaactctgtgttgtgaatgtcattcacaacagaaaacccaaaatattatgcaaactactgtaagcaagaaaaataaaggaaaaatggaaacatttattcctttgcataatagaaattaccagagttgttctgtctttagataaggtttgaaccaaagctcaaaacaatcaagacccttttctgtatgtccttctgttctgccttccgcagtgtaggctttaccctcaggtgctacacagtatagttctagggtttccctcccgatatcaaaaagactgtggcctgcccagctctcgtatccccaagccacaccatctggctaaatggacatcatgttttctggtgatgcccaaagaggagagaggaagctctctttcccagatgccccagcaagtgtaaccttgcatctcattgctctggctgagttgtgtgcctgtttctgaccaatcactgagtcaggaggatgaaatattcatattgacttaattgcagcttaagttaggggtatgtagaggtattttccctaaagcaaaattgggacactgttatcagaaataggagagtggatgatagatgcaaaataatacctgtccacaacaaactcttaatgctgtgtttgagctttcatgagtttcccagagagacatagctggaaaattcctattgattttctctaaaatttcaacaagtagctaaagtctggctatgctcacagtctcacatctggtgggggtgggctccttacagaacacgctttcacagttaccctaaactctctggggcagggttattcctttgtggaaccagaggcacagagacagtcaactgaggcccaacagaggcctgagagaaactgaggtcaagatttcaggattaatggtcctgtgatgctttgaagtacaattgtggatttgtccaattctctttagttctgtcagcttttgcttcatatattttagcgctctattattagatatatacatgtttagtattatgtcttattggtgcatttactctcttatcattatgtaatgtccttctttatctgtgataattttctgtgttctgaagtctactttgtctaaaaataacatacgcactcaacttccttttctttcttccttcctttctttcttccttcctttctttctctctctctctttccttccttccttcctccttttctctctctctctctctctctctcttttcttgacagactctcgttctgtggccctggctggagttcagtggtgtgatcttggctcactgctacctctaccatgagcaattctcctgcctcagcctcccaagtagctggaactacaggctcatgccactgcgcccagctaatttttgtatttttcgtagagacggggtttcaccacattcgtcaggttggtttcaaactcctgactttgtgatccacccgcctcggcctcccaaagtgctgggattacaggcatgagccatcacacctggtcaactttcttttgattagtgtttttgtggtatatctttttccatcatgttactttaaatatatctatattattgtatttaaaatgtgtttcttacagactgcatgtagttgggtataatttttatccagtctaaaaatatctgtcttttaattggtgtttagacaatttatatttaataaaatggtggaatttaaa

SEQ ID NO: 309 - DNA, 533 bp, Homo sapiens
tcgacaacagttggaacagtaatcagtttgctaacatatttaaagtcttgaatgttgaagaactcatgtgatttacccttttcaactttttggaaaacgatttaatttattctaattagattaaccctattaatctatggattgggtatcaaaatgaatgccagtccagatgtgcctagacacgaaattggagctgaggactctcacgatatgcaagttcatccaacgtgaagataccataagctttttctctgaaccagagaaatgaaagtcagtttaagaggctgatagatcttggccctgttaaggcatccacttcacagttctgaaggctgagtcagccccactccacagttaggccaagaattagattttaaaacttcatctgtctgtcccagttaactgttaaataaggcctcatcctccactgaagagtatggattgaaggattgtgaactatgtttagtgtgattgtgaacttggtgcctaatgttccatgtctgaagtttgccccagtgctacacgttggagta

SEQ ID NO: 310 - DNA, 6189 bp, Homo sapiens
ggacacgggtttctctatgaaacatttgggatccggccacagttctcctggcacgttgacccgtttggcgcctctgccacgacgcccaccctatttgcgctggcgggcttcaatgcccacctcggctcccggatcgactacgacctgaaggcagccatgcaggaggcccgggggctgcagttcgtgtggcgagggtccccatccctctcagagcggcaggaaatcttcacgcacatcatggaccagtacagctactgcaccccgtcccacatccctttctccaacaggtcaggattttactggaatggcgtggctgtcttccccaagcctcccccagatggggtgtaccccaacatgagtgagcctgtcaccccagccaacatcaacctctatgccgaggccctggtggccaacgtgaagcagagggccgcctggttccggacaccgcacgtcctctggccctggggatgtgacaagcagttcttcaatgcctcggtgcagtttgccaacatggacccgctgctggaccacatcaacagccatgctgccgagctcggtgtctcggtgcagtatgccacgctgggcgactacttccgtgccctgcacgctctcaatgtcacctggcgtgtccgcgaccaccacgacttcctgccctattccacagaaccattccaggcctggacgggcttctacacgtcccgcagctcactgaaggggctggcccggcgagccagcgccttgttgtatgccggggagtccatgttcacacgctacctgtggccggccccccgtgggcatctggaccccacctgggccctgcagcagctccagcagcttcgctgggccgtctccgaggtccagcaccatgatgccatcactgggactgagtcccccaaggtgagagacatgtacgcaacgcacctggcctcggggatgctgggcgtgcgcaagctgatggcctccatcgtcctagatgagctccagccccaggcacccatggcggccagctccgatgcaggacctgcaggacattttgcctcggtctacaacccgctggcctggacggtcaccaccatcgtcaccctgactgttggtttccctggagtccgcgtcacagatgaggcgggccacccagtgccctcgcagatccagaactcaacagagaccccatctgcgtatgacctgcttattctgaccacaatcccaggcctcagttaccggcactacagcatcagacccactgcaggggcccaagagggcacccaggagccggctgccactgtggcgagcacccttcaatttggccgcaggctgaggagacgcaccagccatgcgggcaggtacttggtgcctgtggcaaacgactgctacattgtgctgctcgaccaggataccaacctgatgcacagcatctgggagagacagagtaaccgaacggtgcgcgtgacccaggaattcctggagtaccacgtcaacagggatgtgaaacagggccccatttccgataactacctgttcacaccgggcaaggccgcggtgcctgcgtgggaagctgtggaaatggagattgtggcgggacagcttgtgactgagatccggcagtacttctacaggaacatgacagcacagaattacacgtatgcaatccgctcccggctcacccatgtgccgcagggccatgacggggagctgctctgccaccggatagagcaggagtaccaagccggccccctggagctgaaccgtgaggctgtcctgaggaccagcaccaacctaaacagccagcaggtcatctactcagacaacaacggctaccagatgcagcggaggccctacgtttcctatgtgaacaacagcatcgcccggaattactaccccatggttcagtcggccttcatggaggatggcaaaagcaggcttgtgttgctgtcggagcgggcacatggcatctccagccaagggaatgggcaggtggaggtcatgctccaccggcggctgtggaacaacttcgactgggacctgggctacaacctcacgctgaacgacacctcagtcgtccacccagtgctctggcttctgctgggatcctggtccctcaccactgccctgcgccagaggagcgcactggcgctgcagcacaggcccgtggtgctgttcggagacctcgctgggactgcgccgaagctcccaggaccccagcagcaagaggccgtgacgctgcccccgaatcttcacctgcagatcctgagcatccctggctggcgctacagctccaaccacacggagcactctcagaatctccggaaaggccatcgaggggaagcccaggctgacctccgccgtgtcctgctgcggctctaccacctgtatgaagtgggcgaggacccagtcctgtctcagccagtaacagtgaatctggaggtgaacttccccacccccatccagaccataagccagggaagcaaaccctagatgaagccccaagaaactgccttggcaaagagatccacgagggcttcctcccaaatggacgctggtatgggccccaccccgcccttcttcatggtcttctgggtttgtcaggtattacaactggcctggttttttagggttttttgtgtatatgtgagacaggatctcactctgttgcccagtctggggtgcagtggcacaatctcagctcactgcaacctctgcctccctggctcaagtgatcctcccacctcaacctcccaagtaactgggatcacaggggcgcgccaccacgatggctaagtttttttttttttttttttgagaccgagtttcgctctcgtcccccaggctggagtgcaatggtgcgctctcagctggctgcaacctccatctcccaggttcaagtgattctcctgcctcagcctcccgagtagctgggattacaggcatgtgccaccacgcccggctaatttttttgtacttttagtagagacagggtttctccatgttggtcaggctggtcacgaacccctgacttcaggtgatccacctgcctcggcctcgcaaagtgctgggattacaggcgtgagccaccaagcctggcctagtttttttatttttagtagagacacggtcttgctgtgttgctcaggctggtctcgaacgtctggcctcaagcaatctgcctgtcttagcctcctgaagtgctgggattacaggcgtgagtggcctgtattttctttcttatttattctgtggtaaaacttttaaaacacagacaacatctgtgtaatccaaaaacaaaacagattccccatagagttgctttgaaaggtgacttagagtcagacaatccagggtccacacccaggcccctctacgggggcatctccggcaccccatgcctctgggcctcagtttccccccatgtaaaatggggagaggtgagagttctttgcccagaaggttgctgagaggccctggcactaaggggcctcgtgcagtgtcagggcccccaggcctcgtccccttccaggttcccctcttggctgatgttgccctctcagctctactatcaggcgaggcttccgccacctggcctgcccacgctccctccccagaaggcatgacctgagccgcctcatttctttcccagtttgcattctttctatttcatttcctgctcatggagaatttctgtgaatctctgtgtttctgccttgggcctccttcgacatctgagtcttcaggggaatccagagaagccccagtaccttttcgccatgatgtcttactgggccacccacctcctctttcatgatcctcgccagggaggatcctttcctcacggtccctggcctgcctgagagcaggtctaggccatggcgggtaccagtgcccagcacagggccagcctgccctgggaagcaaggaggccggcgtgggacctggaagttggtcatctgatgctcccccgtttcacagatggaagcaccaaggccctgagacaaggagacggttgggatggacaccatgactccctgcccaacgtggacggtggtggggtggaaagaccattgagttaggaacgcagtgagtttggctgcaagtcacaaaacacctaacagatgtgcttagaacagaggacagagtgttttctcaccgaacaggcatgtccgatggaccccaagcgctgtcaccgtgggcccgatcactgtcgtcttcccgccatcgccggcagactggcttttgtcttttgccgtctgcttgtttgcggtcacaagatggcacaggcctccctcatgagcaaatttcaaggcagggtggggctcggcagtagtggccagaaaggccttgccctagcgtggctctctccctccgtcagcacacagaagcttctccaagagccacccccacccctcctgctccacagacttttccagacccctaagggcctcctgcctcccctaggtgtaagggaggctgggacaaggcctattgggaaagggggatggggtaactgtggctggcttcctccctggactgggcacggggccacctgagcaatgtggggagaggagaactccgcggtggggtgggcagctcaaaatgccacacctcccgggctgctcctccagctcggccacctggtaaagcatgcacctcccgcttcagtgtcctcatctgtaaagtacacggccagtcctgtcctcgcagatgtgctgtgagaagcagatgagggagctgtgtcaggcaccaggggaggacctgggctcctgaggacaccgagttcgtggtgtgtctgccctgctgctgtcttggttctctgctcagctctggaacttggtgcagctcactctccctctgctcctctccctgcaggctgtgctgcaggcgctggggtccgtggtggcagtggaggagcgctcgctcacagggacctgggatttgagcatgctgcaccgctggagctggaggacggggcctggccgccacagaggtgacaccacctctccctcgaggccaccaggaggccccatcatcaccgtccacccaaaggaaatccggacgttctttattcactttcaacagcagtgagccctgggcagatgccccgtccccagggcttcccccaggaactccatgtaacagaacagacccaggacagggaaaagcagtgcggagggatgggactggggagtcagctgctcatctgcaggctaatggcaggaaatggtcatatttggggtttttccctaatttttttaaacaaaaattacattacaagatccaggttcttcccccccacactcaatcaagccagccctctcctcttctgtcacgtaaaggatatttggcacactcatgcgtcattcattcacaaaacacaaacccaggactttctgcctaaggcagaacacaagactcacagcagcaccgaagcgcatctgccgtccgggccctgccaggcttgccaggctgccagtggtaactgtggacctactgcgtgccacgtgttttcatagactcatcccatgctggcaacagccctgcaaggggcttggctctgccacagggcaggagaggaagttgtagcgcctagcgagagttccagccccagacgcccacctgtgcctcagggcaccgcctgccgagcagagaaggcacagcagccgtcagagtccatgagaggtgaaaccacacagcagggatgtccaatatcagaactattaatatcaataaaagtataaccttcccaggtctatgcccaagagaattgaaaacatccatccacacaatacctgtgctcccgcgttcatagcagcattactcaaaagtcaaacggtagcaacaacccaaatgtccatccacagatgaattaagacatgaagtgtgttctgtccatacaatggaatattatttggccataaaaaggaaggaaattctgacgcatgccacagcctgagtgaatcctacaaatattacgctaagtgaaagaagccaatcacgagtttatgtgaaatgtccagaataggcaaatctgtgtatcagagacaaagcacattggtggttgccaggtactggaggaagagagaagaggcatgacagctaacagggacgggctttctttggaagatgatgaaattgtggaatgatggttgcacaactttgtgaatatactagaaaccaatgaattaaaaactttggaagatg

SEQ ID NO: 311 - DNA, 7011 bp, Homo sapiens
cgcttcctgcgcctcttcaggtcaccgcttgctctagttcccaggctttggcctctagtggatgagaatcaccgagtctgcggggctggacgctgaccgcccgggccagcacctaggcgggcgggagctgtgcggcccagggttcgcgcgggccgggtagaggctcgagccgggacccccgagcgtgaaccccggagccagcggcgctggggccagaggggccgggcgggaggtggtggcggaggcgaaggggcgacgggacctgggcctggcccgtgtgtgtcctcggcggcctggcgccggccgtcgctgtacggtgagccccagggaggcggatctgggccccgagaaggacacccgcctggatttgccccgtaggcccggcccgggcccctcgggagcagaacagccttggtgaggtggacaggaggggacttcgcgagcagacgcgcgcgccagcgacagcagcccgccccggcctctcgggagccgtggggcagaggctgcagagccccaggagggggccagtgtcattcaaagatgtggctgtggatttcacccaggaggagtggtggcaactggaccctgatgagaagataacatacggggatgtgatgttggagaactacagccatctagtttccctggcttatgaggtggcaacatcttgtacttcggagatctgaagccgagcaacttgcccaagtccttcttcttttcccattaacaagatatgatatcaccaagccaaacgtcatcattaagttggagcagggagaggagctgtggataacgggaggtgaatttccatgtcaacatagtccagcccttcacatcctcagccgaagatctcacttcctcccagaggcctttgctgactgacccctcagggattgtgggactttaccaaatcggtttgtaataacacctagaagacgctatccgatccatcaggcccagtattcctgtctgggggtacttcccaccgtgtgctggaatggttatcacaagaaggctgtgctgtcccctcgcaactccaggatggtgtgtagcccagtgactgtgaggatcgcccctcctgacagaagattttcgcgttctgcgataccagagcagataatcagctcaacactgtcctcaccatcaagtaacgccccagacccatgtgcaaaggagacagtactgagtgccctcaaagagaaggagaagaaaaggacagtggaggaagaagaccaaatattccttgatggccaggaaaataaaagaaggcgccatgatagcagtggcagtggacattcagcatttgagcccctggtggccaatggagtccccgcttcttttgtgcctaagcctgggtctctgaagagaggcctcaattctcagagctcagatgaccacttgaataagagatcccgaagctcttccatgagctccttgacaggcgcttacgcaagtggcatccctagctccagccgcaatgccattaccagttcctacagctccactcgaggcatctcacagctctggaagagaaatggccccagttcatcacccttctctagcccagcctcctcccgctcccagacaccggagaggccagcaaagaaaataagagaagaggagctgtgtcatcattccagttcttcaactccattggcagcagacagggagtcccagggagaaaaggctgcagatacaaccccaaggaagaaacaaaactcgaattctcagtctacacctggcagctctgggcagcgtaagcggaaagttcagctgctgccttctcggcgaggggaacagctgaccttgcctccacctccccagcttggctattcgatcactgccgaggacctagacttagagaagaaggcttcattacagtggttcaaccaggccttggaggacaagagcgatgctgcctcgaactctgtcactgagaccccacctatcactcagccttcatttacctttaccctgcctgctgctgcacctgcctccccacccacctccctcctggccccaagcaccaacccactgttagagagcttgaagaagatgcagactcccccgagcctgccaccctgcccagaatctgctggagcagcaaccactgaggccctctcacctccaaagacacccagcctcctacccccgctgggtttatcacagtcagggccgccagggctgctccccagcccctcctttgactccaaacccccgaccactttgctggggctgatccctgctccatccatggtaccagccactgacaccaaggcacctccaacccttcaggcagagacggctaccaaaccccaagccacatctgccccgtcccccgcccccaagcaaagcttcctgtttggaacacagaacacctcaccttccagccctgccgcccctgctgcatcttcagcacctcccatgttcaagcccattttcacggctccacccaagagtgagaaggaaggccccacaccgcctggcccttcagtcacagccacagcgccctccagctcctccctccccacgaccaccagcaccacagccccgaccttccagcctgtctttagcagcatggggccacctgcatctgtgcccttgcctgctcccttcttcaagcagacaactactcccgccactgctcccaccacaactgccccgctcttcactggcctggccagcgccacctctgctgtggctcccatcacctctgccagtccatccacagactctgcttcgaagcctgcgtttggctttggcataaacagtgtgagcagcagcagtgtgagtaccacgaccagcaccgccactgccgcctcacagcctttcctcttcggggcgccccaggcctctgctgccagcttcaccccggccatgggctccatattccagtttggcaaacctcctgccttgcccacaaccaccacagtcaccaccttcagccagtccctgcacactgccgtgccaacggccaccagcagcagcgctgccgactttagtggttttggcagcaccctcgccacctccgccccggccaccagcagccagcccactctgacgttcagtaacacgagcacccccacgttcaacattccctttggctcaagcgccaagtccccgctcccatcatatccgggagccaacccccagcccgcatttggggccgctgaggggcagccaccgggggccgccaagccggcccttgcccccagctttggcagctctttcacttttggaaactctgcagccccggctgctgcacccacacctgcacctccgtccatgatcaaggtcgtgcctgcgtacgtgcctacgcccatccatcctatctttggcggtgccacgcactcggcgtttgggttgaaagccacggcttcggccttcggcgctcccgccagctcacagcccgcctttggcggctccactgctgtcttcttcggtgcagccaccagctccggctttggagccaccacccagaccgccagcagcgggagcagcagctcggtgtttggcagcacaacaccatcacccttcacgtttgggggttcggcagcccccgctggcagtgggagctttgggatcaacgtggccaccccaggctccagcaccaccaccggagctttcagctttggagcaggacagagtgggagcacagccacctccacccccttcgcagggggcttaggtcagaacgccctgggcaccaccggccagagcacaccgtttgccttcaacgtgagcagcacaactgagagcaaacctgtgtttggaggcaccgccacccccacctttggtctgaacacccctgcgcctggagtgggcacatcaggcagcagcctctcctttggggcatcctcagcacccgcccaaggctttgttggtgttgcacctttcggcaacacttttgctcaccagcaagaacacagcccgaggaagggacccaataacctttcaaaacgcaaactgctgcctgcggtgagggcccagggtcctccacggagaggacaggcatcttcctttcccaccaggaaggagtgagcccggagcctctgctatgtgcaaggcggtgtgcaagcaccggctgcagctttttgctctcttctttctctttggggctgggctgggtgtgcgttctggtgctgatgctttggcctgtgaggctgagctagagaaatgtagatgttagatgtgccagtaccatcctgcgcctcccaagcatgcccccactcactcacgtcggcatctcgacccgttcaattacagcaacgaagaagccaccgctaagcgtggtcttgggggaagcccggaggcagtgctcggcacccgggaacgtgctcaggcctcggtggggccgggcaggcagggcgggagctagcctgcaagagaaacagccccaatgctgggtaagagagcagttcaccccatccccccctccacgaccctggcgcacgccctgtacctgaaggcgcccgggttctgctgcagcgcatcttgtaccatgtcttcattctcctcctggcagagggagcacatggagtagacgagccgctgcagggaagggaaagtgagcgcgtggcacagggctcgctgctggaaccctgccagggcatgcagacgcaccgggctaggtgtccctgccccgggctcctccagctgtctgctcggcatacctaaggaaaagcgtgtctcggttacacagcttcacaggctgcctcagtcctgaaatcctcgctcctgaaatcctcgcttcacagaggagaacttttgctccagggtcccaagcccattaaagtgtcagaactaagaccaaaacagatgactccaggtctaagctgctgtggacctctgagtccctcagccacgccttctcaccatctcacccgagccactgcaggaaggatccagcaggacatagtggacctcacgatagcgcggatctaagggggagaccgccaggaagtcctcctcagccagctcacagcaggagacgccagcccaggccagcagcgtggccatggatgccagccgcctggcatccaggtcaaaggcaaagatcttcctagggcagagggcagagcaggggtgagctgagcatgcatggagcagctaagggcctgtcacagctgacacagacaaccagaacatgcaggttaagccaggacacacaatattgaaacagcctatatttaaagggcccagggtcagaggtaactggcctggggtctctgccccaagggctaagggatccacatctcacacctgcagtggggaaagcttagcttggggcaaataccgtgaactactttggtgcagcaggaaagagttaagcgaaagtcatcctttcagccttcattacccactgaaaggcacaaaatcaaaccccatgtcctcctcctcctcctgtggcactcacccttggttcttcagaagagcagccaagtgactggtctttattgcctggggtggcacaggcatccatgacatgggagcctggcgggggtccagcagcatggctgggagacagctggcctggcaggcagaacacaggggccgggtaaacagagaccccaggctaggcccttcccgtgcctacacattcttcccttttctattcctcttgcctaccctgtcctgcagaatgaggtgtccggcccggtacagtgggtgttcatgcagatctgtctgggcgggaaacaccagcagctccggcatcaaggggtccaggagaaaatgcttccccttgagggctcgtaagtcatcgaggctgccagggaagaaccattcattcatcatttcctgaatttctccctgccaggccctatttcaacggtccattcatgcaacaaatgttaccacagctatggagaaatcaacagggtgataagggaatccgggatccgcagttgagggaatgggttgtcaagccagacttatgggtcaggagccccctctactgtttaccagcagtgggagcctgggcaagtgattcaatctcaagccccactggcatctctgtaaaatagtaggtgtgaggattcaatgagccaatatatccaagatacttacgtgccacaatttaataaatgttagctattcctgttgaagcataaccttggagaaaggttactttacaggggggtgaggagtggggaagtgagagctgagctcattcttgatggatgaggagttagtcatgtgaggcgcttaggttaaaactacattcactataactcagtaaagcagtcccgcccactctccgacccatgcagaaataggcctagagagtcacatgtctcagttcagaaatctatcgaagtggcagagctggaattcaaacacaagcagccgttctctgctattccaccctggtgtccaagcaacatggtagggcagaaggaagaggatcttacaaagagtaagggaaagggagaggggcagaggctgcttctcagagccaccaaaggacaaaataagacaggtgtgagcccagtggaggaggcacggggcagagaccagccactgttgctggcacgctggtgcacgtagcactgtggcagatggacctggagaggaagcaggagggacagcacaatggagccaagaaaggacttagcatggccgggcgcggtggttcatgcctgtaatcccagcattttgggaggccaaggtgggcagatcacctgaggtcaggagtttgagaccagcctggccaacatggagaaatcccgtctctactaaaaatacaaaattagccaggcatggtgctgcatgcctgcaatcctgtagggaaaagaaagagagatcagactgttactgtgtctgtgtagaaagggaagacataagaaattccattttgacctgtaccttgaacaattggttggctgagatgctgttaatttgtgactttgccccaaatttgagctcacaaaaacatgtgttgtatggaatcaaggtttaaaggatctagggctgtgcaggacatgccttgttaataaaacgtttacaagc

SEQ ID NO: 312 - DNA, 2919 bp, Homo sapiens
ttgacgcggcgttagtattggcccgtgtacccgaaaaactgattgactgggctggcgttaactgtgcggaggcagttggccgtgtttacatcagtggttggagaccagacctaacagacaggtgtgtcctgtttgcaaagctggcatcagccgagacaaggtcatccccctctatggaaggggcagcactgggcaacaggaccccagagagaagacccctcctcgtcctcaaggacagaggccagagccggagaatagagggggatttcaaggatttggatttggagatggtggcttccagatgtcttttggaattggggcatttccctttgggatatttgccacagcatttaatataaatgatgggcggcctcctccagctgtccctgggacaccccagtatgtggacgagcagttcctgtcacgcctcttcctatttgtggccctggtgatcatgttctggctcctgattgcctaatgctgggctcctgcctacatccgtggcagggctctggactggtgacgtgccaccccaactcctggtgtttggcttcctgctaatcttgactcctggaatcagtgggatcagtaacacatcaaggagtcttgtttcttcatcagagctttggaactcgagaccagttggcgatgacccctgaatatcgccaccgctgtaaacactctataacttcaggccttggcattgagtcatctctcatgggtgacaccatgaaatcttgtttcagccagttctgcaggtcctgactctgcagagggaagaggcagaaagagagaaactgtcagagtataatttcacctgagtttaatattacagaaacaaagggatgcaccaaatggtatttctggaaattttcatgtctttaaataccccttggtaagttgcttctgaagccagtgggggctcctcagatagagaggttcccctttcaaatcccagtgccgctctgttctctttccttcccctcccactccccctcttcttcctctgtagagatgcaagaaattgctgtcccataaaaatcataattgcagtagctaaagctggggtcacttcgtgaattcaccagagactcaaagatcttttattggctctgggctgtgctcagtgtctttggcctcagagaacaacttgaatgacttcctggtttcctggcataaattattcctggtgagacatgtggcttaactcacaggtttcccatcagctttctccctaaaactatgttcatctgcctctctctgccagagaacatacagccgagaatactgccgaagctgagactgactactgtgcattaggaaagacctggagtcaggactttggtgggatttggagctccgaggcagtaataactgaacaagcagccctgtcccctaggctgcagaagcttgaatgcatcctctcccagaacctgccacaggaaactgggggctttgtcaggtcagcccaactgcatgcaaaagaccaccatcctcagaagccaagttgtcttttatgaagaggcaaggaaaggggaaacccacatgtgaccctgattttggtatggcttgatagagttccctgaaaactccttgtatgtgtgctaaaaccagggaagcatgtgactgccaagcaggcaacccctgatgatttgtaaagccaggtggcagggccttggggagccccagcacaatgatattgtgtggtcttccctcctgtggaatcgaggggaaattattcttcccaataccttgatttgattttcagtttcataagcttcttcctctgaatcttattgagggactatggtaccaagcaggtaggactgttcacctggtggaacagttcttgctctgccttctaggcttcatcccagaaatccagcctctttctggagaccccaaagctggagggagatgggctttcctctgggcctctctcctactttgccatccacactgctcctggctaaccccagcaataaccaacaaatggtaggaagccccatctattgctttttctcaattatgactgcatagtttgtggaaacaaagatcttgaggaagatgagggaagccctcccctcttcatagtccccatctcttctcctttgtacctgtcaacaccagagttcagtgtttaaacagacaaaatataaagtattgagtaggtggttcatatgccgaatccacttggtaggaagaaaccaccagctttatagtgtgcctgatagattttaaacattcctgggcacccactcaagagtgctctttttatcaccttctggaaatccgcaaagttgcaggggcctctggagtgtctcttctctagagagaattggtgggacccccctcagtgcagtggccccaactagtggagggagaaaggacttaagtcagatggactcaacagaaatgggtttccagaagaataatgaaaagttgtgggtaggaaaatgaatcatttggactcttcaatgaaatggagtgagcccaggagagctcagccaacagaggcactctgggaacctgttagtaaagccaggctggccaaatgccatttgattttgaacctcgtaggtccccactcaccctctgccaggagctaagtaaggcaggagagctgacttgggactcctggctcggccccaacagggagcccccctcccaccatccttcggcaagctcaccacctcatccttctgccaaggcagctttcctttcttttgtgtgttttctgtgttcttagcctccaccctcctcctgccacccttgtggactaggaccaggtcctgaccccagtcagaaaatgatgatatgtacagtggcacaccttaaccagtcactaattttcactgttgtgaaagtgatttgatttagaattaaacaaatggtattacattaaaaaaaaaaaaaaaa

SEQ ID NO: 313 - DNA, 1908 bp, Homo sapiens
agacgcacagggatggcggcggaggcggccgatttggggctgggggccgccgtccccgtggagctgaggcgggagcgacgcatggtgtgcgtggagtacccgggagtggtgcgtgatgtggctaagatgctgccgactctgggcggcgaggaaggcgtctcccggatctacgcagaccccaccaagaggctggagctgtacttccggcccaaggacccatactgccacccagtgtgcgccaaccgcttcagtaccagcagcctgctgctccgcatcaggaagagaacgaggcggcagaaaggggtgctgggcactgaggcccactccgaggtcacatttgacatggagatccttggcatcatctccaccatttacaaatttcaggggatgtctgacttccagtacttggctgtgcatacggaagcaggcggcaagcatacgtcaatgtatgacaaggtgctcatgctccggcccgagaaggaggcctttttccaccaggagctgccgctctacatccccccacccatcttctcccggctggacgccccggtggactacttctaccgaccagagacccagcaccgggaaggctacaacaatccccccatctcaggtgagaatctgattggcctgagcagagcccggcgcccccacaatgccatctttgtcaactttgaggatgaggaggtgcccaagcagcctatggattcgatttgggtatgacccccgaaaaaacccagatgccaagatttatcaagtcctcgatttccgaatccgttgtggaatgaaacacggttacgcccccagtgacttgccggtcaaagcaaagcgcagcacctacaactacagcctccccatcaccgtcaagaagacatccagccagcttgtcaccatgcatgacctgaagcagggcctgggcccgtcggggacgagtggtgctcggaaaccagcttccagcaagtacaagctcaaggtcagccttcagacactgagggactctgtctacatcttccgggaaggggccttgccaccctatcggcagatgttctaccagttatgcgacttgaatgtggaagagttgcagaagatcattcaccgcaatgacggggcagagaattcctgcacagaacgggatgggtggtgcctccccaagaccagcaacgagctcagggacaccatgtccctcatgatccggcagaccatccgctccaagaggcctgctctcttttccagctcagccaaggctgatggcggaaaagagcagctgacgtacgagtctggggaagacgaggaggatgaggaggaggaggaagaggaggaggaggacttcaagccatccgacggcagtgaaaacgaaatggagacagagattctggactacgtgtgacagggcccaaggctgggcctccctgacccggccagactggtgtctggcctaatgagggagccggggctccccattgccacccacagtgcccggaatggccctaggaggccctctgaggagagctagagtcccagcaaagggtgcagctgaccctagcactggctgtgacatgctgcttggtgctgcctctggtcctgaggggttagggacatccccaaagggtataccctggctctgccacccatgaaccagcccagcatccagccagtgagtgggcacccaatgcctctcaggatgagaccagtaaatgccggaggtggagctgggcagctgtggagccccaggccacaggccagtctcgcttggctctcatgactgtggtggtggagatagtgtggggagcctcgcccatggtctcacgtggcaagaagtgcctttagctctggatcccaaccgtttggcacagctttggccacagccaggcccctctggaattgtccttattaaaccagtttcccgag

SEQ ID NO: 314 - DNA, 1086 bp, Homo sapiens
ggggatgaagacggttacctttctgaaggaattgttcggacagatgaagaggaggaagaagagcaagatgccagttccaatgataacttttctgtgtgtccttctaacagtgtgaatcataactcctacaatggaaaggaaactaaaaataggtggaagaacaattgccctttttcggcagatgaaaattatcgtcctttagccaagacaaggcaacagaatatcagcatgcaacggcaagaaaaccttcgttgggtgtcagagctctcttacgtagaagagaaagaacaatggcaagaacaaatcaatcagctaaagaaacagcttgattttagtgtcagtatttgtcagactttgaagaaggccctgtggatgtccagacttccctccaggctaacactgaggctactgaagaaaatgaacatgatgaacaggtcctacaacgtgactttaaaaagacagcagaaagcaaaaatgtcccattggaacgagaagccactagtaaaaatgaccaaaataactgtcctgtgaaaccctgttacctcaatatcttggaagatgagcaacctttaaatagtgctgcccataaggagtcacctcctactgttgattcaactcaacagcctaaccctttgccgttacgtttacctgaaatggaacccttagtgcctagagtcaaagaagttaaatctgctcaggaaactcctgaaagctctctggctggaagtcctgatactgaatctccagtgttagtgaatgactatgaagcagaatctggtaatataagtcaaaagtctgatgaagaagattttgtaaaagttgaagatttaccactgaaactgacaatatattcagaggcagatctaagaaagaaaatggtagaagaagaacagaaaaaccatttatctggtgaaatatgtgaaatgcagaccgaagaattagctggaaattctgagacactaaaagaacctgaaacggtgggagcccagagtatatgagatgtcttcagaggctcatctaactctgtccttacatactcaatgcatatatgaaaacaatactaaataaacatctgcatctgtataa

SEQ ID NO: 315 - DNA, 4213 bp, Homo sapiens
tccactcctggagcccgcggaccccgagcacgcgcctgacagcccctgctggcccggcgcgcggcgtcgccaggccagctatggcccccgacccggtggccgccgagaccgcggctcagggacctaccccgcgctacttcacctgggacgaggtggcccagcgctcagggtgcgaggagcggtggctagtgatcgaccgtaaggtgtacaacatcagcgagttcacccgccggcatccagggggctcccgggtcatcagccactacgccgggcaggatgccacggatccctttgtggccttccacatcaacaagggccttgtgaagaagtatatgaactctctcctgattggagaactgtctccagagcagcccagctttgagcccaccaagaataaagagctgacagatgagttccgggagctgcgggccacagtggagcggatggggctcatgaaggccaaccatgtcttcttcctgctgtacctgctgcacatcttgctgctggatggtgcagcctggctcaccctttgggtctttgggacgtcctttttgcccttcctcctctgtgcggtgctgctcagtgcagttcaggcccaggctggctggctgcagcatgactttgggcacctgtcggtcttcagcacctcaaagtggaaccatctgctacatcattttgtgattggccacctgaagggggcccccgccagttggtggaaccacatgcacttccagcaccatgccaagcccaactgcttccgcaaagacccagacatcaacatgcatcccttcttctttgccttggggaagatcctctctgtggagcttgggaaacagaagaaaaaatatatgccgtacaaccaccagcacaaatacttcttcctaattgggcccccagccttgctgcctctctacttccagtggtatattttctattttgttatccagcgaaagaagtgggtggacttggcctggatgattaccttctacgtccgcttcttcctcacttatgtgccactattggggctgaaagccttcctgggccttttcttcatagtcaggttcctggaaagcaactggtttgtgtgggtgacacagatgaaccatattcccatgcacattgatcatgaccggaacatggactgggtttccacccagctccaggccacatgcaatgtccacaagtctgccttcaatgactggttcagtggacacctcaacttccagattgagcaccatctttttcccacgatgcctcgacacaattaccacaaagtggctcccctggtgcagtccttgtgtgccaagcatggcatagagtaccagtccaagcccctgctgtcagccttcgccgacatcatccactcactaaaggagtcagggcagctctggctagatgcctatcttcaccaataacaacagccaccctgcccagtctggaagaagaggaggaagactctggagccaaggcagaggggagcttgagggacaatgccactatagtttaatactcagagggggttgggtttggggacataaagcctctgactcaaactcctcccttttatcttctagccacagttctaagacccaaagtggggggtggacacagaagtccctaggagggaaggagctgttggggcaggggtgtaaattatttcctttttctagtttggcacatgcaggtagttggtgaacagagagaaccaggagggtaacagaagaggagggacctactgaacccagagtcaggaagagatttaacactaaaattccactcatgccgggcgtggtggcacgcgcctgtaatcccagctacccaggaggctgaggcaggagaatcgcttgaaccggggaggtggaggttgcagtgagctgagatcacgccattgtactccagcctgggcgacagagcaagactccatttcaaaaaaaaaaaaaaaatccactcatataaaaggtgagctcagctcactggtccatttctcagtggcttctccatcctcatttgcaaacctcagagggataaggcagttgaacctgatgagcaagaattataacagcaaggaaacattaatgcttagaattctgagatccagcacaactcagtctgtgggagctcagctcgctgcccagggataggtatgacctatgtctgccttaggctgctgggagatgccattctccagtttcagaagcaggcagggcaaaggtcaagactgtggtattggggtcttttggctctgaaggatcctggaaccactgattttggtttattccctccagggtctaaagagaacaagaggtgctagctcttaccaaaacagatggtagagagagttgctggctatttaaaaagctctttcatcttttaattcacctcttcttttcacctctttaaccactcctcaggaacagaacacttctaggactgggggtcttttagctccataagcaagtgagcagatgggacaagttagtcttttctccctagaaacaaaggggatgcccagtggtttccctttgcttcccaacctaaaatttcaagtttaataaaatagcaattagcagaagtgaccaaattgggagataattatcagtcatgaggaaagacacagatttcggtcataaagaatgtaagggctataagtagaaactttctataacctaaatgatgttatagaattatttttgagcaggagcagaaagattaaatatgatcacttcatacttctaaatcagaaataggaagattaaaaccacagaacagtttgtgatttctattgctgtagctaggtatcttactctgtccactcttgttcaagtatctaactcttctggaaaccaaataggctttagaagagattatcctatattcctatcagtataatactaaaatgtaactttttaatcatctggtttttaaaagataaacagtttagcccatctctccagagagcaaacataggaatatgactcaggagcctcctagggcttatcatcagccctcacacccgcttccccctccaacccacagcctttgcttccaggtggcaggattactactttgcctcttcagcagcatctactctaggcatattgatcattttagacactgggagaagagaacctcaaactaggaggaaaagacagagcctccacttagttttgggaggggatggcagacagtcaaggagatgagcgtcctaaggcatgttgggatagggtcagatgcaccacccatggagaggtttgtcaacacaaagacatggaaggttagaggtttgtcaacaaaaagacatggaaggttaggtttgtcaacacaaagacatggaagattagaggtttgtcaacacaaagacacaggaagaatgggctgcagaagatttagatgttttccatttgggcacattttacttagctggagaactaggtttaaaacagcctgggtaggaaaattagaagcaagctggatgcagtggctcatgcctgtaatcccaacacttttgggaggtccaggcaggaggatcacttgggcccaggaggtcaagcctgcagcgagctgagatcacaccactgcactccagcctggggtgatagaacaagaccctgtctcaaaaaaaaaaaaaaacaacaaaaacttagaattgaggagttgtacctccattggcttcctcactccaaaataggtgctgatccttcctattcctattctttgccaccttttgggtgtggtgtcaccagcctgtttagccaagtagctttgggcataggctgcccaatctgagcaaacaccagtgaggctctattgagccaagaccaagtcctcaaagcacctgaaccactgtggccttctcagcctacagcagtgtggtctcttacatggccacaaagggacacacagtgacaaaaggctcggaatgttacaatggtaaaatgagtgatctcaaatccactgacagatataaaataggcttagagaggaaaagctgcctctggtcaagtagatcatggcagcatgaattccaactcacttttttacaactccaacttctatgtttatctttgttactttcacttttttacaacctggccagaggcattttttaaatcaggcccaatatcagtattctttttgtgtgtgccaattttgttatcacatccctatgaagttgaaaaataaagttaattttgaccaaaaaaaaaaaaaaaag

SEQ ID NO: 316 - DNA, 1647 bp, Homo sapiens
ccgcggagtgacaggggtccctctgggccggagccggcggcagtggtggcagcggtatcgccgccctagctcaccgcgccccttttccagcccgcgacgtcgccgcgcaagcgaggcagcggcggccgccgagaaacaagtggcccagcctggtaaccgccgagaagcccttcacaaactgcggcctggcaaaaagaaacctgactgagcggcggtgatcaggttcccctctgctgattctgggccccgaaccccggtaaaggcctccgtgttccgtttcctgccgccctcctccgtagccttgcctagtgtaggagccccgaggcctccgtcctcttcccagaggtgtcggggcttggccccagcctccatcttcgtctctcaggatggcgagtagcagcggctccaaggctgaattcattgtcggagggaaatataaactggtacggaagatcgggtctggctccttcggggacatctatttggcgatcaacatcaccaacggcgaggaagtggcagtgaagctagaatctcagaaggccaggcatccccagttgctgtacgagagcaagctctataagattcttcaaggtggggttggcatcccccacatacggtggtatggtcaggaaaaagactacaatgtactagtcatggatcttctgggacctagcctcgaagacctcttcaatttctgttcaagaaggttcacaatgaaaactgtacttatgttagctgaccagatgatcagtagaattgaatatgtgcatacaaagaattttatacacagagacattaaaccagataacttcctaatgggtattgggcgtcactgtaataagttattccttattgattttggtttggccaaaaagtacagagacaacaggacaaggcaacacataccatacagagaagataaaaacctcactggcactgcccgatatgctagcatcaatgcacatcttggtattgagcagagtcgccgagatgacatggaatcattaggatatgttttgatgtattttaatagaaccagcctgccatggcaagggctaaaggctgcaacaaagaaacaaaaatatgaaaagattagtgaaaagaagatgtccacgcctgttgaagttttatgtaaggggtttcctgcagaatttgcgatgtacttaaactattgtcgtgggctacgctttgaggaagccccagattacatgtatctgaggcagctattccgcattcttttcaggaccctgaaccatcaatatgactacacatttgattggacaatgttaaagcagaaagcagcacagcaggcagcctcttccagtgggcagggtcagcaggcccaaacccccacaggtttctaagcatgaattgaggaacagaagaagcagagcagatgatcggagcagcatttgtttctccccaaatctagaaattttagttcatatgtacactagccagtggttgtggacaaccatttacttggtgtaaagaacttaatttcagtataaactgactctgggcagcattggtgatgctgtatcctgagttgtagcctctgtaattgtgaatattaactgagatagtggaaaaaaaaaaaaaaaaaaaaaaaaaaaaaaaaaaaaaaaaaaaaaaaaaaaaaaaaaa

SEQ ID NO: 317 - DNA, 1494 bp, Homo sapiens
cttggtgacactggatagaacagctcaagccttgccacttcgggcttctcactgcagctgggcttggacttcggagttttgccattgccagtgggacgtctgagactttctccttcaagtacttggcagatcactctcttagcagggtctgcgcttcgcagccgggatgaagctggtttccgtcgccctgatgtacctgggttcgctcgccttcctaggcgctgacaccgctcggttggatgtcgcgtcggagtttcgaaagaagtggaataagtgggctctgagtcgtgggaagagggaactgcggatgtccagcagctaccccaccgggctcgctgacgtgaaggccgggcctgcccagacccttattcggccccaggacatgaagggtgcctctcgaagccccgaagacagcagtccggatgccgcccgcatccgagtcaagcgctaccgccagagcatgaacaacttccagggcctccggagctttggctgccgcttcgggacgtgcacggtgcagaagctggcacaccagatctaccagttcacagataaggacaaggacaacgtcgcccccaggagcaagatcagcccccagggctacggccgccggcgccggcgctccctgcccgaggccggcccgggtcggactctggtgtcttctaagccacaagcacacggggctccagcccccccgagtggaagtgctccccactttctttaggatttaggcgcccatggtacaaggaatagtcgcgcaagcatcccgctggtgcctcccgggacgaaggacttcccgagcggtgtggggaccgggctctgacagccctgcggagaccctgagtccgggaggcaccgtccggcggcgagctctggctttgcaagggcccctccttctgggggcttcgcttccttagccttgctcaggtgcaagtgccccagggggcggggtgcagaagaatccgagtgtttgccaggcttaaggagaggagaaactgagaaatgaatgctgagacccccggagcaggggtctgagccacagccgtgctcgcccacaaactgatttctcacggcgtgtcaccccaccagggcgcaagcctcactattacttgaactttccaaaacctaaagaggaaaagtgcaatgcgtgttgtacatacagaggtaactatcaatatttaagtttgttgctgtcaagattttttttgtaacttcaaatatagagatatttttgtacgttatatattgtattaagggcattttaaaagcaattatattgtcctccccctattttaagacgtgaatgtctcagcgaggtgtaaagttgttcgccgcgtggaatgtgagtgtgtttgtgtgcatgaaagagaaagactgattacctcctgtgtggaagaaggaaacaccgagtctctgtataatctatttacataaaatgggtgatatgcgaacagcaaaccaaaaaaaaaaaaaaaaaaaaaaaaaaaaaaaaaa

SEQ ID NO: 318 - DNA, 891 bp, Homo sapiens
  misc_feature (559)..(559): n is a, c, g, or t
  misc_feature (726)..(726): n is a, c, g, or t
ttttaacaaacatgtttattagaaaagtaaaaaatattgcataggtcttaatacttgaacatcaagtgtattcatgaacagtgagtatcttatcttcatgtaaacagttctagatggaagacccagatggcactcctcccggggagtggttccagcccccacccatctcagcccctcccctgccagctcaactctgcagtacacgatgggggaaggcttaaacgcagctgccaggtgtaatttttcaagtgtcaaagatcccaagtgatccctgacacccaccccttcctactcttacattcatgcgtctgtaagatagctgcctacaacaggtcagtagtgatgctccgatcagaaaaacaagatacaaaacaaacaacaaacacacttggtcccttcagaccagtaagatacacaaaccacctccacgacctccgacctcccccctccctccggctgctctgaggagacgtgcctcttccttcaccctgggccatgctggtgcgggacgagccagctgctctctggatgtcacacactgttaactgtcagtatcaanaatagtaaggtcatgctacacacacatccagctggaagcatgttagtccctaagctttgtatcatgctaacgtctgagggtatgtgtcccatgcaagcacctgaaacaatcatgagcttctgggaaaactatcgcactcacctagtgctgctcagtttctacaaggnatcatcttagtctgctctagtccaccaagatcagtcgctctgttgaaggcattggccatcatgtgagtacatcttatgagagtgtcgggctgaagtctctgatgctgagcatgtcagtcagactgctacagtagaagaatgtcgagaagcctgttctggcaattt

SEQ ID NO: 319 - DNA, 713 bp, Homo sapiens
gggcctactacattggcgctattcttaggacttctgcaacttttaaagtcttacttgtctttctgtgctttgtattaggagttccccgtgtgggtctagaactccccttggtaatgcttcttgtttttttatggcccttctgttctcaggatggagagaacacagaagctactatccatgtcaggatttattctatttatatcttattacaataaaattagtggcactttattcataaatattcatgagcctgttaatgttagttgtcttcctgtagctgaatcaacaagttattttcaactcaattttatgacttgcgaaaaagctttgccctgttgtgtaccataacatttaaaagaatggaaaatgactgaaatccaatttagattatttttagagtatttttccagcaaattcaatttattctgaaatttaaatccagatcttttctaatatggtattacaatgaaaagaataaagagaagattgaattttcagtttcattttcaaaaactatttaccaaaacaaatggagaagaaacatccaaaagcacatttcatttctccaaacttggtgtttaaattatagttattaatggtaggtcattttaaatgtccctcgtatttttctccaggttgtttaggttaagttctagttttctcataagtgactggaagggtgggaatttggcgccgatgggggccggaggggg

SEQ ID NO: 320 - DNA, 601 bp, Homo sapiens
ggcacgagtgcaggaggggagaccctggaggagagagcccgcctcaattgatgcctgcagattgaatttccagaggcttaggaggaggaagttctccaatgttctgtttccaggccttgctcaggaagccctgtattcaggaggctaccatttaaagtttgcagatgagcttatggggggcaatcttaaaaagtccacagcagatgcatccggctcgaggggccatcagctttgaataaatgcttgttccagagcccatgaatgccagcaggcacccctcctttcctggggtaaaggttttcagatgctgcatcttctaaattgagcctccggtcatactagttttgtgcttggaaccttgcttcaagaagatccctaagctgtagaacattttaacgttgatgccacaacgcagattgatgccttgtagatggagcttgcagatggagccccgtgacctctcacctacccacctgtttgcctgccttcttgtgcgtttctcggagaagttcttagcctgatgaaataacttggggcgttgaagagctgtttaattttaaatggccttagactggggatatattagaggaagcagattgtc

SEQ ID NO: 321 - DNA, 453 bp, Homo sapiens
  misc_feature (288)..(288): n is a, c, g, or t
  misc_feature (318)..(318): n is a, c, g, or t
  misc_feature (326)..(326): n is a, c, g, or t
  misc_feature (404)..(404): n is a, c, g, or t
aaattcaacaattttattaaatataaattgtctaaacaccaattaaaagacagatatttttagactggataaaaattatacccaactacatgcagtctgtaagaaacacattttaaatacaataatatagatatatttaaagtaacatgatggaaaaagatataccacaaaaacactaatcaaaagaaagttgaccagggtgtgatggctcatgcctgtaatcccagcactttgggaggccgaggcgggtggatcacaaagtcaggagtttgaaaccaacctgacgantgtgggtgaaaccccgtctctacggaaaantacaaaanttaggctggggcgcagtgggcatgagcctgttaggttccagctacttggggagggctgagggcagggagaattgctcntgggtaggaggtaggcagttgagcccaaggttcacaccacttgaactcc

SEQ ID NO: 322 - DNA, 557 bp, Homo sapiens
  misc_feature (496)..(496): n is a, c, g, or t
  misc_feature (500)..(500): n is a, c, g, or t
  misc_feature (504)..(504): n is a, c, g, or t
  misc_feature (521)..(521): n is a, c, g, or t
  misc_feature (534)..(534): n is a, c, g, or t
  misc_feature (543)..(543): n is a, c, g, or t
  misc_feature (551)..(551): n is a, c, g, or t
aaattcaacaattttattaaatataaattgtctaaacaccaattaaaagacagatatttttagactggataaaaattatacccaactacatgcagtctgtaagaaacacattttaaatacaataatatagatatatttaaagtaacatgatggaaaaagatataccacaaaaacactaatcaaaagaaagttgaccaggtgtgatggctcatgcctgtaatcccagcactttgggaggccgaggcgggtggatcacaaagtcaggagtttgaaaccaacctgacgaatgtggtgaaaccccgtctctacgaaaaatacaaaaattagctgggcgcagtggcatgagcctgtagttccagctacttgggaggctgaggcaggagaattgctcatggtagaggtagcagtgagccaagatcacaccactgaactccagccagggccacagaacgagagtctgtcaaaaaaagagagagagagagagagagaaagaaanggangaanggaaaggaaggaaaganagagagagagaangaaagggangaagaaanaaagga

SEQ ID NO: 323 - DNA, 705 bp, Homo sapiens
  misc_feature (467)..(467): n is a, c, g, or t
ggtgcatccctttgtttctgtaatattaaactcaggtgaaattatactctgacagtttctctctttctgcctcttccctctgcagagtcaggacctgcagaactggctgaaacaagatttcatggtgtcacccatgagagatgactcaatgccaaggcctgaagttatagagtgtttacagcggtggcgatattcaggggtcatcgccaactggtctcgagttccaaagctctgatgaagaaacaagactccttgatgtgttactgatcccactgattccaggagtcaagattagccaggaagccaaacaccaggagttggggtggcacgtcaccagtccagagccctgccacggatgtaggcaggagcccagcattaggcaatcaggagccagaacatgatcaccagggccacaaataggaagaggcgtgacaggaactgctcgtccacatactggggtgtcccanggacagctggaggaggccgcccatcatttatattaaatgctgtggcaaatatcccaaagggaaatgccccaattccaaaagacatctggaagccaccatctccaaatccaaatccttgaaatccccctctattctccggctctggcctctgtccttgaggacgaaggagggtcttctcctctggggtctggttgccagtgctgccccttccatagagggggatgaccctgtctcgctg

SEQ ID NO: 324 - DNA, 886 bp, Homo sapiens
ctgtgcattaggaaagacctggagtcaggactttggtgggatttggagctccgaggcagtaataactgaacaagcagccctgtcccctaggctgcagaagcttgaatgcatcctctcccagaacctgccacaggaaactgggggctttgtcaggtcagcccaactgcatgcaaaagaccaccatcctcagaagccaagttgtcttttatgaagaggcaaggaaaggggaaacccacatgtgaccctgattttggtatggcttgatagagttccctgaaaactccttgtatgtgtgctaaaaccaggaagcatgtgactgccaagcaggcaacccctgatgatttgtaaagccaggtggcagggccttggggagccccagcacaatgatattgtgtggtcttccctcctgtggaatcgaggggaaattattcttcccaataccttgatttgattttcagtttcataagcttcttcctctgaatcttattgagggactatggtaccaagcaggtaggactgttcacctggtggaacagttcttgctctgccttctaggcttcatcccagaaatccagcctctttctggagaccccaaagctggagggagatgggctttcctctgggcctctctcctacttggccatccacactgctcctggctaaaccccagtaataaccaacaaatggtaggaagccccatctattgctttttctcaattatgactgctagttgtggcaccacgatctgcaggacatgagggaaggcctccccttttcatagtcccactccttctcctttgtactgttaccccattccggttcacggccaattacactttgcgcagcggtcaatgccgaaccttgttgaaacccctctttgggccac

SEQ ID NO: 325 - DNA, 924 bp, Homo sapiens
aagacactcaagttgttctctgaggccaaagacactgagcacagcccagagcacaacttgaatgacttcctggtttcctggcataaattattcctggtgagacatgtggcttaactcacaggtttcccatcagctttctccctaaaactatgttcatctgcctctctctgccagagaacatacagccgagaatactgccgaagctgagactgactactgtgcattaggaaagacctggagtcaggacttggtgggattggagctccgaggcagtaataactgaacaagcagccctgtcccctaggctgcagaagcttgaatgcatcctctcccagaacctgccacaggaaactgggggctttgtcaggtcagcccaactgcatgcaaaagaccaccatcctcagaagccaagttgtcttttatgaagaggcaaggaaaggggaaacccacatgtgaccctgatttggtatggcttgatagagttccctgaaaactccttgtatgtgtgctaaaaccaggaagcatgtgactgccaagcaggcaacccctgatgatttgtaaagccaggtggcagggccttggggagcccagcacaatgatatgtgtggtcttccctcctgtggaatcgaggggaaattattcttcccaaattacctttgatttgattcttcagtttcataagcttcttcctctgaatctttatgagggactatggtaccaaagcaggtaggactgttcacctggtggaacagttcttgtctgccttctaggcttcatcccagaaatccaggctctttctggagaacccaaagctggaggagagggctcctctggggctttctctatttggcacccacggtcggtaaccccgcataacacaatgggggaagccactatggtttcattgacgcatgggacacattg

SEQ ID NO: 326 - DNA, 644 bp, Homo sapiens
  misc_feature (572)..(572): n is a, c, g, or t
gctggaaatccgcaaagttgcagggcctctggagtgtctcttctctagagagaattggtgggacccccctcagtgcagtggccccaactagtggagggagagaggacttaagtcagatggactcaacagaaatgggtttccagaagaataatgaaaagttgtgggtaggaaaatgaatcatttggactcttcaatgaaatggagtgagcccaggagagctcagccaacagaggcactctgggaacctgttagtaaagccaggctggccaaatgccatttgattttgaacctcgtaggtccccactcaccctctgccaggagctaagtaaggcaggagagctgacttgggactcctggctcggcccaacagggagcccccttcccaccatccttcggcaagctcaccacctcatccttctgccaaggcagctttcctttcttttgtgtgttttctgtgttcttagcctccaccctcctcctgccacccttgtggactaggaccaggtcctgaccccagtcagaaaatgatgatatgtacagtggcacaccttaaccagtcactaattttcacntgtgtgaaagtgattcgatttagaattaaacaaatggttttacattactatgaaaaaaaaaaaaaaaaaaac

SEQ ID NO: 327 - DNA, 2594 bp, Homo sapiens
gaggggtcggaggtcttacccaacagattgacgcggcgttagtattggccgtgtacccgaaaaactgattgactgggctggcgttaactgtgcggaggcaggatttccctggggaaagtcttcactcagagcttcgctgacagccaaggatggcaagcaaggggccctcggcctctgcatctcctgagaactccagtgcaggggggcccagtgggagcagcaatggcgctggcgagagcggagggcaggacagcactttcgagtgcaacatctgcttggacacagccaaggatgccgtcatcagcctgtgtggccacctcttctgttggccgtgtttacatcagtggttggagaccagacctaacagacaggtgtgtcctgtttgcaaagctggcatcagccgagacaaggtcatccccctctatggaaggggcagcactgggcaacaggaccccagagagaagacccctcctcgtcctcaaggacagaggccagagccggagaatagagggggatttcaaggatttggatttggagatggtggcttccagatgtcttttggaattggggcatttccctttgggatatttgccacagcatttaatataaatgatgggcggcctcctccagctgtccctgggacaccccagtatgtggacgagcagttcctgtcacgcctcttcctatttgtggccctggtgatcatgttctggctcctgattgcctaaagctggggtcacttcgtgaattcaccagagactcaaagatcttttattggctctgggctgtgctcagtgtctttggcctcagagaacaacttgaatgacttcctggtttcctggcataaattattcctggtgagacatgtggcttaactcacaggtttcccatcagctttctccctaaaactatgttcatctgcctctctctgccagagaacatacagccgagaatactgccgaagctgagactgactactgtgcattaggaaagacctggagtcaggactttggtgggatttggagctccgaggcagtaataactgaacaagcagccctgtcccctaggctgcagaagcttgaatgcatcctctcccagaacctgccacaggaaactgggggctttgtcaggtcagcccaactgcatgcaaaagaccaccatcctcagaagccaagttgtcttttatgaagaggcaaggaaaggggaaacccacatgtgaccctgattttggtatggcttgatagagttccctgaaaactccttgtatgtgtgctaaaaccagggaagcatgtgactgccaagcaggcaacccctgatgatttgtaaagccaggtggcagggccttggggagccccagcacaatgatattgtgtggtcttccctcctgtggaatcgaggggaaattattcttcccaataccttgatttgattttcagtttcataagcttcttcctctgaatcttattgagggactatggtaccaagcaggtaggactgttcacctggtggaacagttcttgctctgccttctaggcttcatcccagaaatccagcctctttctggagaccccaaagctggagggagatgggctttcctctgggcctctctcctactttgccatccacactgctcctggctaaccccagcaataaccaacaaatggtaggaagccccatctattgctttttctcaattatgactgcatagtttatggaaacaaagatcttgaggaagatgagggaagccctcccctcttcacagtccccatctcttctcctttgtacctgtcaacaccagagttcagtgtttaaacagacaaaatataaagtattgagtaggtggttcatatgccgaatccacttggtaggaagaaaccaccagctttatagtgtgcctgatagattttaaacattcctgggcacccactcaagagtgctctttttatcaccttctggaaatccgcaaagttgcaggggcctctggagtgtctcttctctagagagaattggtgggacccccctcagtgcagtggccccaactagtggagggagagaggacttaagtcagatggactcaacagaaatgggtttccagaagaataatgaaaagttgtgggtaggaaaatgaatcatttggactcttcaatgaaatggagtgagcccaggagagctcagccaacagaggcactctgggaacctgttagtaaagccaggctggccaaatgccatttgattttgaacctcgtaggtccccactcaccctctgccaggagctaagtaaggcaggagagctgacttgggactcctggctcggccccaacagggagcccccttcccaccatccctcggcaagctcaccacctcatccttctgccaaggcagctttcctttcttttgtgtgttttctgtgttcttagcctccaccctcctcctgccacccttgtggactaggaccaggtcctgaccccagtcagaaaatgatgatatgtacagtggcacaccttaaccagtcactaattttcactgttgtgaaagtgatttgatttagaattaaacaaatggttttacattaaaaaaaaaaaaaaaaaaaaaaa

SEQ ID NO: 328 - DNA, 681 bp, Homo sapiens
  misc_feature (12)..(12): n is a, c, g, or t
tctgactggggncaggacctggtcctagtccacaaggtggcaggaggagggtggaggctaagaacacagaaaacacacaaaagaaaggaaagctgccttggcggaaggatgaggtggtgagcttgccgagggatggtgggaagggggctccctgttggggccgagccaggagtcccaagtcagctctcctgccttacttagctcctggcagagggtgagtggggacctacgaggttcaaaatcaaatggcatttggccaggctggctttactaacaggttcccagagtgcctctgttggctgagctctcctgggctcactccatttcattgaagagtccaaatgattcattttcctacccacaacttttcattattcttctggaaacccatttctgttgagtccatctgacttaagtcctctctccctccactagttggggccactgcactgaggggggtcccaccaattctctctagagaagagacactccagaggcccctgcaactttgcggatttccagaaggtgataaaaagagcactcttgagtgggtgcccaggaatgtttaaaatctatcaggcacactataaagctggtggtttcttcctaccaagtggattcggcatatgaaccacctactcaatactttatatttggtctggttaaacactgaactctggt

SEQ ID NO: 329 - DNA, 3196 bp, Homo sapiens
gagaggggcggctccgcgtcatgtgactggagtccgcgtaggaggggtcggaggtcttacccaacagattgacgcggcgttagtattggccgtgtacccgaaaaactgattgactgggctggcgttaactgtgcggaggcaggatttccctggggaaagtcttcactcagagcttcgctgacagccaaggatggcaagcaaggggccctcggcctctgcatctcctgagaactccagtgcaggggggcccagtgggagcagcaatggcgctggcgagagcggagggcaggacagcactttcgagtgcaacatctgcttggacacagccaaggatgccgtcatcagcctgtgtggccacctcttctgttggccgtgtttacatcagtggttggagaccagacctaacagacaggtgtgtcctgtttgcaaagctggcatcagccgagacaaggtcatccccctctatggaaggggcagcactgggcaacaggaccccagagagaagacccctcctcgtcctcaaggacagaggccagagccggagaatagagggggatttcaaggatttggatttggagatggtggcttccagatgtcttttggaattggggcatttccctttgggatatttgccacagcatttaatataaatgatgggcggcctcctccagctgtccctgggacaccccagtatgtggacgagcagttcctgtcacgcctcttcctatttgtggccctggtgatcatgttctggctcctgattgcctaatgctgggctcctgcctacatccgtggcagggctctggactggtgacgtgccaccccaactcctggtgtttggcttcctggctaatcttgactcctggaatcagtgggatcagtaacacatcaaggagtcttgtttcttcatcagagctttggaactcgagaccagttggcgatgacccctgaatatcgccaccgctgtaaacactctataacttcaggccttggcattgagtcatctctcatgggtgacaccatgaaatcttgtttcagccagttctgcaggtcctgactctgcagagggaagaggcagaaagagagaaactgtcagagtataatttcacctgagtttaatattacagaaacaaagggatgcaccaaatggtatttctggaaattttcatgtctttaaataccccttggtaagttgcttctgaagccagtgggggctcctcagatagagaggttcccctttcaaatcccagtgccgctctgttctctttccttcccctcccactccccctcttcttcctctgtagagatgcaagaaattgctgtcccataaaaatcataattgcagtagctaaagctggggtcacttcgtgaattcaccagagactcaaagatcttttattggctctgggctgtgctcagtgtctttggcctcagagaacaacttgaatgacttcctggtttcctggcataaattattcctggtgagacatgtggcttaactcacaggtttcccatcagctttctccctaaaactatgttcatctgcctctctctgccagagaacatacagccgagaatactgccgaagctgagactgactactgtgcattaggaaagacctggagtcaggactttggtgggatttggagctccgaggcagtaataactgaacaagcagccctgtcccctaggctgcagaagcttgaatgcatcctctcccagaacctgccacaggaaactgggggctttgtcaggtcagcccaactgcatgcaaaagaccaccatcctcagaagccaagttgtcttttatgaagaggcaaggaaaggggaaacccacatgtgaccctgattttggtatggcttgatagagttccctgaaaactccttgtatgtgtgctaaaaccagggaagcatgtgactgccaagcaggcaacccctgatgatttgtaaagccaggtggcagggccttggggagccccagcacaatgatattgtgtggtcttccctcctgtggaatcgaggggaaattattcttcccaataccttgatttgattttcagtttcataagcttcttcctctgaatcttattgagggactatggtaccaagcaggtaggactgttcacctggtggaacagttcttgctctgccttctaggcttcatcccagaaatccagcctctttctggagaccccaaagctggagggagatgggctttcctctgggcctctctcctactttgccatccacactgctcctggctaaccccagcaataaccaacaaatggtaggaagccccatctattgctttttctcaattatgactgcatagtttatggaaacaaagatcttgaggaagatgagggaagccctcccctcttcacagtccccatctcttctcctttgtacctgtcaacaccagagttcagtgtttaaacagacaaaatataaagtattgagtaggtggttcatatgccgaatccacttggtaggaagaaaccaccagctttatagtgtgcctgatagattttaaacattcctgggcacccactcaagagtgctctttttatcaccttctggaaatccgcaaagttgcaggggcctctggagtgtctcttctctagagagaattggtgggacccccctcagtgcagtggccccaactagtggagggagagaggacttaagtcagatggactcaacagaaatgggtttccagaagaataatgaaaagttgtgggtaggaaaatgaatcatttggactcttcaatgaaatggagtgagcccaggagagctcagccaacagaggcactctgggaacctgttagtaaagccaggctggccaaatgccatttgattttgaacctcgtaggtccccactcaccctctgccaggagctaagtaaggcaggagagctgacttgggactcctggctcggccccaacagggagcccccttcccaccatccctcggcaagctcaccacctcatccttctgccaaggcagctttcctttcttttgtgtgttttctgtgttcttagcctccaccctcctcctgccacccttgtggactaggaccaggtcctgaccccagtcagaaaatgatgatatgtacagtggcacaccttaaccagtcactaattttcactgttgtgaaagtgatttgatttagaattaaacaaatggttttacatta

SEQ ID NO: 330 - DNA, 1331 bp, Homo sapiens
ttgacaccagaccaactggtaatggtagcgaccggcgctcagctggaattctgcagcacaatgatattgtgtggtcttccctcctgtggaatcgaggggaaattattcttcccaataccttgatttgattttcagtttcataagcttcttcctctgaatcttattgagggactatggtaccaagcaggtaggactgttcacctggtggaacagttcttgctctgccttctaggcttcatcccagaaatccagcctctttctggagaccccaaagctggagggagatgggctctcctctgggcctctctcctactttgccatccacgctgctcctggctaaccccagcaataaccgacaaatggtaggaagccccatctattgctttttctcaattatgactgcatagtttgtggaaacaaagatcttgaggaagatgagggaagccctcccctcttcatagtccccatctcttctcctttgtacctgtcaacaccagagttcagtgtttaaacaaacaaaatataaagtattgagtaggtggttcatatgccgaatccacttggtaggaagaaaccaccagctttatagtgtgcctgatagattttaaacattcctgggcaccactcaagagtctctttttatcaccttctggaaatccgcaaagttgcaggggccctctggagtgtcccttctctagagagaattggtggacccccctcagtgcagtgcccccaactagtggagggagagaggacttaagtcagatggactcaacagaaatgggtttccagaagaataatgaaaagttgtgggtaggaaaatgaatcatttggactcttcaatgaaatggagtgagcccaggagagctcagccaacagaggcactctgggaacctgttagtaaagccaggctggccaaatgccatttgattttgaacctcgtaggtccccactcaccctctgccaggagctaagtaaggcaggagagctgacttgggactcctggctcggccccaacagggagcccccttcccaccattcttcggcaagctcaccacctcatccttctgccaaggcagctttcctttcttttgtgtgttttctgtgttcttagcctccaccctcctcctgccacccttgtggactaggaccaggtcctgaccccagtcagaaaatgatgatatgtacagtggcacacccttaaccagtcactaattttcactgttgtgaaagtgatttgatttagaattaaacaaatggttttacattactatgaaaaaaaaaaaacggaattccgccgatactgacgggctccaggagtcgtcgccacc

SEQ ID NO: 331 - DNA, 724 bp, Homo sapiens
  misc_feature (724)..(724): n is a, c, g, or t
gatgacgcggcgtagtattggccgtgtacccgaaaaactgattgactgggctggcgtgaactgtgcggaggcagggatttcaaggatttggatttggagatggtggcttccagatgtctttggaatggggcatttccctttgggatatttgccacagcatttaatataaatgatgggcggcctcctccagctgtccctgggacaccccagtatgtggacgagcagttcctgtcacgcctcttcctatttgtggccctggtgatcatgttctggctcctgattgcctaatgctgggctcctgcctacatccgtggcagggctctggactggtgacgtgccacccaactcctggtgtttggcttcctggctaatcttgactcctggaatcagtgggatcagtaacacatcaaggagtcttgtttcttcatcagagctttggaactcgagaccagttggcgatgacccctgaatatcgccaccgtgtaaacactctataacttcaggccttggcattgagtcatctctcatgggtgacaccatgaaatcttgtttcagccagttctgcaggtcctgactctgcagagggaagaggcagaaagagagaaactgtcagagtataatttcacctgagtctaatattacagaaacaaagggatgcaccaaatggtattctggaaatctcatgtctctaaatacccctgagaacatacagccgagaatactn

SEQ ID NO: 332 - DNA, 2919 bp, Homo sapiens; identical to SEQ ID NO: 312

SEQ ID NO: 333 - DNA, 1760 bp, Homo sapiens
gcagcaggccaagggggaggtgcgagcgtggacctgggacgggtctgggcggctctcggtggttggcacgggttcgcacacccattcaagcggcaggacgcacttgtcttagcagttctcgctgaccgcgctagctgcggcttctacgctccggcactctgagttcatcagcaaacgccctggcgtctgtcctcaccatgcctagcctttgggaccgcttctcgtcgtcgtccacctcctcttcgccctcgtccttgccccgaactcccaccccagatcggccgccgcgctcagcctgggggtcggcgacccgggaggaggggtttgaccgctccacgagcctggagagctcggactgcgagtccctggacagcagcaacagtggcttcgggccggaggaagacacggcttacctggatggggtgtcgttgcccgacttcgagctgctcagtgaccctgaggatgaacacttgtgtgccaacctgatgcagctgctgcaggagagcctggcccaggcgcggctgggctctcgacgccctgcgcgcctgctgatgcctagccagttggtaagccaggtgggcaaagaactactgcgcctggcctacagcgagccgtgcggcctgcggggggcgctgctggacgtctgcgtggagcagggcaagagctgccacagcgtgggccagctggcactcgaccccagcctggtgcccaccttccagctgaccctcgtgctgcgcctggactcacgactctggcccaagatccaggggctgtttagctccgccaactctcccttcctccctggcttcagccagtccctgacgctgagcactggcttccgagtcatcaagaagaagctgtacagctcggaacagctgctcattgaggagtgttgaacttcaacctgagggggccgacagtgccctccaagacagagacgactgaacttttggggtggagactagaggcaggagctgagggactgattccagtggttggaaaactgaggcagccacctaaggtggaggtgggggaatagtgtttcccaggaagctcattgagttgtgtgcgggtggctgtgcattggggacacatacccctcagtactgtagcatggaacaaaggcttaggggccaacaaggcttccagctggatgtgtgtgtagcatgtaccttattatttttgttactgacagttaacagtggtgtgacatccagagagcagctgggctgctcccgccccagcctggcccagggtgaaggaagaggcacgtgctcctcagagcagccggagggaggggggaggtcggaggtcgtggaggtggtttgtgtatcttactggtctgaagggaccaagtgtgtttgttgtttgttttgtatcttgtttttctgatcggagcatcactactgacctgttgtaggcagctatcttacagacgcatgaatgtaagagtaggaaggggtgggtgtcagggatcacttgggatctttgacacttgaaaaattacacctggcagctgcgtttaagccttcccccatcgtgtactgcagagttgagctggcaggggaggggctgagagggtgggggctggaacccctccccgggaggagtgccatctgggtcttccatctagaactgtttacatgaagataagatactcactgttcatgaatacacttgatgttcaagtattaagacctatgcaatattttttacttttctaataaacatgtttgttaaaacaaaaaaaaaaaaaaaaa

SEQ ID NO: 334 - DNA, 1732 bp, Homo sapiens
gcgagcgtggacctgggacgggtctgggcggctctcggtggttggcacgggttcgcacacccattcaagcggcaggacgcacttgtcttagcagttctcgctgaccgcgctagctgcggcttctacgctccggcactctgagttcatcagcaaacgccctggcgtctgtcctcaccatgcctagcctttgggaccgcttctcgtcgtcgtccacctcctcttcgccctcgtccttgccccgaactcccaccccagatcggccgccgcgctcagcctgggggtcggcgacccgggaggaggggtttgaccgctccacgagcctggagagctcggactgcgagtccctggacagcagcaacagtggcttcgggccggaggaagacacggcttacctggatggggtgtcgttgcccgacttcgagctgctcagtgaccctgaggatgaacacttgtgtgccaacctgatgcagctgctgcaggagagcctggcccaggcgcggctgggctctcgacgccctgcgcgcctgctgatgcctagccagttggtaagccaggtgggcaaagaactactgcgcctggcctacagcgagccgtgcggcctgcggggggcgctgctggacgtctgcgtggagcagggcaagagctgccacagcgtgggccagctggcactcgaccccagcctggtgcccaccttccagctgaccctcgtgctgcgcctggactcacgactctggcccaagatccaggggctgtttagctccgccaactctcccttcctccctggcttcagccagtccctgacgctgagcactggcttccgagtcatcaagaagaagctgtacagctcggaacagctgctcattgaggagtgttgaacttcaacctgagggggccgacagtgccctccaagacagagacgactgaacttttggggtggagactagaggcaggagctgagggactgattccagtggttggaaaactgaggcagccacctaaggtggaggtgggggaatagtgtttcccaggaagctcattgagttgtgtgcgggtggctgtgcattggggacacatacccctcagtactgtagcatgaaacaaaggcttaggggccaacaaggcttccagctggatgtgtgtgtagcatgtaccttattatttttgttactgacagttaacagtggtgtgacatccagagagcagctgggctgctcccgccccagcctggcccagggtgaaggaagaggcacgtgctcctcagagcagccggagggaggggggaggtcggaggtcgtggaggtggtttgtgtatcttactggtctgaagggaccaagtgtgtttgttgtttgttttgtatcttgtttttctgatcggagcatcactactgacctgttgtaggcagctatcttacagacgcatgaatgtaagagtaggaaggggtgggtgtcagggatcacttgggatctttgacacttgaaaaattacacctggcagctgcgtttaagccttcccccatcgtgtactgcagagttgagctggcaggggaggggctgagagggtgggggctggaacccctccccgggaggagtgccatctgggtcttccatctagaactgtttacatgaagataagatactcactgttcatgaatacacttgatgttcaagtattaagacctatgcaatattttttacttttctaataaacatgtttgttaaaaaaaaaaaaaaa

SEQ ID NO: 335 - DNA, 134292 bp, Homo sapiens
gatcatctggctcaaatatcagttcttccaaaatcctcatagtgccatcctcgagggccctgggagccctgcagcttctctctggggtgacaatagcatgtgtagcctcaacagggacactataagaataaaagagtgtgctattactatttatgccatgatcacaggaatacccaggactgtccctgacacactggacatagggtcaccctacttctccctaagttcaggtgacacaaggagtaggagtgaggtgggcagacagcaagtgagaaatggggtggacagggcacacagtggggtggccaggctggtgcatttgtggccctgtctatggggccagcaggaccagtggggtcagtagagcatatactgagcttgaagaggtggcatggagcacttagaagctctatctgctgcttgtcatctcttggcatgtggaaggccttctgcagagttacgctccagacatagcctcggagtcctgaatatcccccaggctcctggaatcaaggagtgtcttagacggcttgagctgctttaacaaaaataccataagctgggtggcttataaacagcaagcatctattactcacagttctggaggctggaagtccaagatcgtgacaccgacagatttggtgtctggtgaaggctgttgcttgttcatagatagagcgttctcgctgtgtcctcatgtggtggaagggcagaggaatctctctgggttccttttataaaggaagtaatcccattgatgagggcttcacccttacgacctactcacctcccaaagaccccacctccagataccatcgcattggaggttaggtatttagcacatgaaatctgggggcaacagacattcaggccacagcaagaagcttcaggagaaagctttcagtcttgtgaaatgtgaatgaggctttcccacagcctagacctgtcttcacgccccagccgcagcctcttgcattcacggtggcttttgagcatcctctgaccactgagtcacaaacctccctgttccctctctatctggctattttcttggtaggaccagaaaaacttttttttatagtcttgccaccatgccatgtagttttcgtacattgcagctatttcaaattactgcattaccacagaacactttttctgtaataacccagaatcaacagtttttttctagctgttaacctggcctcaaaatcttccctttatttgggccccctttttcttctgtccttaactctgactctggtagagcccatggaactgacagttcaaagcccgcgtggcttttctctccccaccacaacatcttcatctaaatagagtcttgtaacatttacctgccctctctcccttgaaaatcactgttccctggtccctgttggggagcctgggccttaagcccctttgtctttgccctagaagaacttcctctccagctgagtcaggttctcatgagattctaggggtggcttggcctcctatatccacttccctcaacattggcctgtagccacatatggcctggactttggcccagcttccagcatgcccaataatgtcagccctgtggggaagttcctggaggtgtacaaggacgtgacaattcagtggtagggacatcggggtgcttgttcatgtggaaactgactttaccattttcctcttttctgagtagtttatcatttctggattgctgtctgtcattttgggaagaaaatcaaacaagcatctggtgagtataggaacaacagtgcctcacttactaaaaagagactttagcggaacctcatccagttggatctttccaaggttcagacaaaggaactgaaccccaggttgctgacaagtgtcctttggtcagtggccctgtggaagtacacagggcccactgatctgggggacacctttcatgatcctcattttgaagagagtcctgtaccctctccaggctctgggtggctttatgggaaaattctgcctcatcatgacaccctttggtgttcactgaccaccggggttcaggtccttggtgagcacaggggaaagaggacagtgagagcatgggctgttagttgtgcaccacagcctgggtgagaaaagcatcaatcaaaagagatgagccttgctggtgggggccaggaagggtgcagagtgaaaagggggtgttcagtgatgggtgcacatctgattgacaaacttttgcagaatcatttccaggcctttcttaggaggctaagaggcatgggttgggggacagagatgggtatggtggagattctggtgacctgggatttgggggtctccctgtcctgacacagaagctgccaagaaactggcagccaagcctcaaggtggcagtgccaggtttggacactgtcattctctcagacctccctcaaaggatcagatgcccttcttcatccccaccctcagcctcccctgagccctccaggaaagcagcctgtgtggatcccctaaacaagggcaggagcaccagccctacagagcaagcagcagctgggtgaggcagacggcggcacaaggtggggaccacggtgttccagggccacttaggctcctaggaaattcacccgccaccatcctcagggacctcttctttgaaaaaaagggactttctcagaacattctgacaacacgagttgtgaatccctggggctgtatggagaaatggcccacgacctttttccatctcttcccccatcactgcccagctctgagattgagcccctgggaagagggcccggatctttgccagaggctgctgggcatacctgagcacacgtgccatgggctgcttgtgacgggctggaacacctagcccaggtgtcccagaagccaccacagacatcagcctattcctcccctggtgttggtctttgaaaagtgagtctggacaccgcaaaactggaatccaggtttcctactttcgaggggaggtagcaccccatggcgcagctgtgattctcagccctcctctgggccgtgccccagccgggatctgaacatccaccctcggccccaggtgctgttgcccccacactgagccctcgtaccccatgctccctggccctcctgccagggcacccttttcacaaagtggagtggatgaaaagaacaggaaagagcaccaaccctgctgctgtccccatatgacagaggctgctgtgggggcatctgttgtacttgggtgagcaggccccttggcctcgagctctaccatgcaggggtgctgcagacagagccaggtgataggaaagagcatgtctgggaacccacctgatgacagcctcagctcaggatgaggcaggaggcctctggctaggcttaggggagatggctggaggaacctcctcagggtgccagtggactgggtaaagccagcagggggcttggaggtcagggaagctgtgatttatcaagcactgtgggcattgcaatattttctctgttcggttcagtccaatgggacatcagttctatacatatcttcctcttcctctagccctgctcagtcctgggtggagaagctaccagaaccacatctcctgtctgtcccaccataagtctctgcttcattcacgctttcatgtgtcgtgcatcaagcaagcatttgcctgtaggcttggggagctctgagaggggttgagagtgaacaaaattaatcaaatcgtataacagaagaggaagtcccatcctgccgaggatcctggatgtgagaacctgctgctggcctggtgggatcgtggtgccccaggagcatgaactgctcaggagcagaccctgaccagatcccctgcaggcctggaacagcctgatcagcagcctcctaagccccatggctgccacagtgggcctcattgtccttccctatcacctagccggggtgttcccagctgccagacagtgccaactggtggtgcctgcccatcagtgccccaagacagccactacttttcgaagaatgagaccaccagctgctttgtggccagctccagcttactggtgagtatttttaggtagaatcttccagactagtgaagtctttgagattttctgcttcttgttcactgcttccttctgatgtggaccatgcggaaagaggcagaacacaggaacccacacatgggagaatagcaggcatttgactggactgtgccaaaagagttgttcaagtacaatatcaagcaagactgtagttgcaaaaagacataaccaacaacttggtttcaatttgagcaccttaataaacaaactgatttaactgtcatagtctcaagggatgggtttttccaagcaagaactctagggtcagggtagcgaattgctcaagaaaggccaagagctcagggagacataggaacctcataaacagggtggccacaggctggcagtgcccaggttcagccaggcaagagccacaggtcaagggaggctgcaagaggctaaatcctaattccatcacatgcacaaaaatggatgggatggccaaaaatgaccccaaaaaatcaggaaacaaatacggaatgggctttttaattgttgtttgcaatcagaactttatgaaaatgacagaatgtggtttcgcattctctgttgcattagagccagtctgagcatcagtatttgctctaaaatgtgtttagtcaataaagtcaagagaacatgtgtgtggaacactgagaaaagaaggcagaggaagtttgcattcctgcagccatagagggggatattctaggggtggagaggcagcaggcagggggaatgtgtgcacagcctggccgttgtcccatcccctcatcgctggcttcaggccatcctcccatagatggagcagctataatgggagtggagggttgaggggcaggggaggcatctgctgagcggctggatggggtttgtgtagtgggttaggatgagctcctcagaaaccagcctgagctctctggctcaggagcttctcaggaagagctgagaagcggcaacccctgcctgaggggtccttgtgttcatttcccatggccacaataacagaggaccacaaactggtgactgaaaacaacagaagtgaattccttcacagttctgaaagcaaagtccaagatcgaggagtcggcagggccgctctttctctgaaggctctaggaaaaaactctttcttgtctcttccagctttggggaactccaggcattctttggcttctggacacgtctttctaacctctgtctccatcctcatgagggcttcccctctgtttgtctctgtgtcctgttctcttcttataagaacaccagttattgcatttagggtccaccctaaatccaggatgatttcaccttgagatccttaactaattgcacctacacagaccatatttccagataaggtcatattctcaggttctatgtagacatgaatttgaggggggacactaacccactatagtcacagtctgtacaaataaattctagattctgcccacctgtggccttacctgttctacttggaagtcattgttccatggaaggtgacccagggaagcagaattgttctcctcctcaggcagatagctcctggggactggcgtgagaattagcaactgtgccagcacatcactttgattggtcaaggtgccccttgctgcctcccagccaagccaagcaggcccaccccagggagcataggtgggtagcaggtgctggcgctcagtttacaaaggaaggccttctgcctcaccacctctgtggacctgcaaaccgccctaaggggtgagtgggaagtccccatcttacagaagatgaaattgaaacccagacaggcggagactctccctggaggccagatgaatgaagagtcaggaggctcagctcaaccttgggtgtcacctgccacctgtactgctgtccctggagtggcccaggatactaggatatgacactgtctcccagatcatgagcaggttgagtcaggtatgagggaagaggagccagcagatgacactgtctaaacccatctggtcatctcaggaaggcagaagggttggccagtccagcacagacctcgtgcatcctgcatttcagaggatcctgtctgtgatgctcctcttcacggcattggagctcagtgtcgctatcctttcttctgtcctcttgtgaaaaaagacctgttcagatgtcctcagggtgaacctgctgtgccctgggctctggggcctgggtggtggcacagggcatggtcctggggccaatggcaggtggtactaaggtcgacccatgaatcttgaccttagtcgaagtcgacaggttttgttgagtgaggcagcagccggcagaacaggatgagagcaagtgcccagggtggaggaatcacaataggaagctatgggaccaaagagagcacatcacacatctgctcatttagcaaagcaggaaacaggctaaggtgcagaagccctctggtccctggaaccctcaagtttttatatttgtgtatcccttgtcttttgtttcaagatattttttaatttctctggtttgattttttggagataaaaggccttccactcagcgtacaaggcctgttcacttgctttgtcctctccagaatgtgtttcctgacccaaagtgacacagtgatcaccagcatgccccaggcagcatttgctgacaccgtcctggagatgaacaaggagtgcacccttagtgtgggggcagagagagagagagcacattgtctgcaggagtcagctgaatgatctcacagaccccacctgctgggctcttccattttatcacaattattccgcctgttcacgtgcagagagaacacttggggcagattttaagaccttagagagtaacttgtttacaaataaaatatctctttgatgatgtatttggattccatgtcattttgccacatttctcttaatttactggacaccaacaatgatataaaagttaagattttaggaaatgtagaaaatttctaaataaaaatcaaaaaagaaaataaaacaacaaaatgaagagctgcctgggagagatgaacccatggtccccgtcttcacgctaagatgcaaaagagcagagcttccagcttccaactggagctcccacacaaaatactggggaaatcttcctccttccaacaatggtcttcctattgatcctgagaccttgctggcaaccagccgtgtctctgcccctctttctgtgctctcgtgactcatcccagcttctctctctgtgcccctttcttgttcccctctgcccatttctctttttatctgaatccccagatgcccctgcacaatctgagtgtgcagagtggcccagccctccctaggaagggaaagcactggccccttgcttggagagaaggcagagactgctctcccacaagactgtagtgccctaaaaccccctgatcagctcacaccttgtttcctggtggccaggccaatgatgaggttcaccacagcctacctcagccagggaccttatgacttaataggggaagagccacagaatatagccacatatatgggcagaagtcctgagatatccatggggctggatactaaagggtctccatttccaagtagaacctaaggttagatgagagaggtttattatcaatgcaggaggatcctcacaggatacaggatttaacagcctaacagggattccagaagatagttcaaatcagattcaaggtaagctcctgtaagtatggaaaaagtgacaactccccacgaaagacagaggtgagaaggctcagagaagtggatatgctggggtggatacactctgtaaatccagaaaaatctacctgctgcctatttttcaattgttcaatttgcctgttaaatcatctgggcctggtcatgctaaatttttttaactaccaattttgatttacttaatgattgtaaatctggtttatccatttcttctgttttttaattcactctgcattgatatttatactacaactctccaaacactatttcacaaatcaagcttctatagcaaaagtaggaaaacgttttaagaaattttattttaccttgtcaatgaccaaaaacacacaagactggcatcctcacccaatttctctagactttgtttctgggatcatcagctatcacatgttgtattagtccgttctcacgctgctataagacagcctaagactgggtaatttataaaggaaagaggtttaattgactcccaggtctgcagggctggagtggccccagaaaacttacaatgccagcagaaggggaagcaaacaccttcttctttacatggtgtcagcaaggagaagggcagagtgaaaggggacagggggaagccccttttaaaaaaccatcagatctgataacaattcactatcacaagaacagcatggaggcaacctcccccatggttcaattacttcccaccaggtccctcccacaacatgtggggattatgggaacaacaattcaggatgagatttgggtgggacacagccaaaccatatcacatgtcttcaatttctgcctcctaaaaatgacatctttgccaggtgtggtggcgcacacctgtaatctcagcagtttagaaggctgaggcaggtgaatcacttgaggtcaggagtttgagaccagcctgaccaacatggtgaaaccccatctctactaaaaacacaaaaaacttagcctggtatggtggtgtgcacctgtagtcccagctactcaggaggctgaggcaggagaattgcttgaacccaggagatagaggttgcagtgagctgatatcacatcactgcactccagcctgggtgacacagcgagactccatctcaaaaaacaaaacaaaacaaaaaaatgacatgctcaaccttggtctttcctcaactgtcaactctgagtgctaagaacctaaaagatatctctgctttactgcacagcaaggtctttgttgtgagttgggttgtgtcctctcaaaatttgtatattgaagttctaacccccagtatctcagaatgtgactttctttggaaatagtgtctttatagaattaaaatgagatcattagggtgggccctaagaggatattagggcacggacactcacagagggacaactgtgtgaagacacagggagaagacagttatctacaaaccaacaagagaggcctcagaagaaatcaacactgcggacaccttaatgtcagaattttggcctccaggactatgagaaaataaatttttcttgttgaagcttcccagtctgtgatacttcgctattgcagctctagcagactaatacacccttcaaattcaccagggccaaattgaacccaccattctcctctaaaaatttcttttgctttcaccattttgtttaaggtcctcactcttcccatcactcaaactctgaaagttcttttcccatagtgaaaaggcctaatgaaggtgtttccccatggattctttccttttagttctgtcttgtggactgcagctgactcagccctgagggtgcccttgatgtccccgctcaattagcatctctaccatttcaccattgcttgcatgagacagtcgaagggtcatgaaagcttctgtgatctggaagacgtattctataacagtagcgtttcacagcagaagccagacttgcaacattgcaaagatcatgggatttggaagcagaaaacctgagtttctatttggactctgccacttaccaagtgtagaacttttggaaaaaccttggaaagtcttcctatctccattatggatcaagagtgtgaccttggttcaccctctcaccattctttccttaatttttttttcttataaataatagcttccaccttccaccctgcagagcaattgtaaacttcataacacatgcgaagcgcttgactcaaaaaacaggaagcactaaggactgttaatttaactggcatctcattacttttataagaaagcctagcataaagaaaaggtgtgtccactgttatgggttgaattgtgccctcccaagaaagatacattgaagctctactccccaaacctcagaatgtgcccttatttggaaatagcagcattgcagatgtcattagttaagacaaagttatactagagtagagcaggccctaatccaatacggcaggtgtctttacgaaaagatagcatgtgaagacacaaacatacaaagagaaggcaaccatgtggtgacaagaggagagactggagtgatgctcctgcaagccaagattgctggcaaaccaccagaagttaggaagaggcaaggtaggattcccttacaggtttcagagggagggtagccagctgacactttagactgctaacctccagagttatgagacaataagttcctgttgtttgaagccgcccagtttgtggtacattgttgcagcagccctaggaaactgatacatctacacaatgcaatgtccttcagccataaaaaggaatgaaacactgacattggctatcatgtggatgaaatgtgaaaacagcatgttcagtgaaagaagccaggcacagaagaccacatattatataattccatgtatgtaaagtgtccagaataggtgaatccatacagactaaacacagattaatggttgccaggggctgcaggaggggagaataggaactgacggctaatgagtataagctttctcttaagggtgatataagtgatctggaattagatagcaatgatagttccaaatcttgtgaatatatttaaaattaaattgtgtaacttaaaatggtgaattttatgtggaataatagcaataaaattcaatagaataaaacaaaatgaacgacatgaagcccaacacctcactggaacatgcaaaacccttcctttattctctggtggatcccatttctcgccattgttcagtgctctctatgccccaccatgctgtcctactctcttcatcctctgccttctcccatgctgtctgcctacctatagtccctctttccccacgccctgttttgttcctgtgctgcccctttctcaccctgtactctttcactttgaagtcactgccccagaaccttctctttcactccacgattgggttgtgttgacccacttgcacatcatatgtttctgagggcagaaatgttggcccataattacagttgtctggttatgtctctgtctccctcactaacatgcaagccctacagaagcaggagctgtgtccagcatgttcaccagggtatcttccaagtgtatcacatgatactaggtgctccgtagacacctgctcaatgtcatataggttcttggtcttctcttccaaataaggtagaatagttatttttcattttacaggtgagaacattcaagttgaaagaaatgaagagaatatttgatgtcccgcaatacaggggaaagccgttactgcatcccaggaatgtttgaccataaagcccttccttgcccactaggccaggtatgtcccatcatagagcccctcaccccacttgcaggttacccttccaaagtgctgttccaaaagagctcaccgagacaaggtgatattggagaagtgatagacacatagatctatggaagacattgggaagcttgggaataaacccacacaattatagctaattattgacaaaggaacagcagcaattcaacagagaaaggaaggtcttttcaacagtgttaaaacaattggacagtctttttttattttttagtttttggttttgtttttgtttttaagacggagtcttgctctgtcatccaggctggagtgcagtggcaatctcggttcactgcaacctccgcctcctgggttcaagcaattctctgcctcagcgtcccaagtagctgggattacaggcgcctgccaccaggcccggctaattttttggatttttagtagagatggggtttcaccatcttggccagtctggtcttgaactcctgacctcgtgatccaccagcctcggcctcccaaagtgctgggattacaggcgtgagccacggcacccagtcaacaattggacagtcttatccagaataatgaatcttgatctaaacctcctaatttacatgtaacaaattgcattagttacaatattaactcaaaatggatcgtagatctaagcataaaatatataaatatataatgcttagactaaaacataggagaaaaaatttttccaatctagttaggcaaagagttcatagatgtgacactgaaagcaaagtatagcaaaaggcaaaaataaattcaataagttgtacttcatcaaaattataacttttgttctgtaaaatacattgttaagtgaatgaaaagatgagctgtagatttggagaaaatattttaaaaaagcacacgtctgacaaggactcatattcagaacacttaagaatgctcaagccaacccaattaaaacaatcaattcaattcaaaaacaagaaaacaaaaccagtttcagaaatgagacaaagactcagacataaacttcagcaacgagggcacgcagcaggcagagcagcccagacaaggtactcaatactatgactcactaggggactacaaatcaaaaccacagtgagatcctgttacacacccattagaatgtctaaaataaaaaccacaaacactagtagtgccggcgaggatgtggagcaacaggactaacacatcgctgccaggaaagcaaaatggcacagctgcactggaaagcaatttgtttcttgtaagtttacacatatacttaccacgggaaccagcaatctcagccctggtatttctcctaaagacataaaagcttatgtccacacagacacccgtacacaaactgttataaaagctccagtcataataggcaaaacccagaagcaaactaaatgtcctttaacaggtgaacatgtaaacaaactatggtgcatccatacaatggagtactgttcagcaaaaaaaaaaaaaatactacactgtatacacacacaggtacacacacatatatctcctaatgttagcagaatttttttaatgtgtaatacagcattgtttactataggtaggatgttatgcatcgaatctctagaatttaatcatcttccatacccgaaattttacacaagctgaaaagcaactcctcatgtccctcttctcacctcccagtaacccccattctacattctgcttctatgagtttaactattttaggtactttatctcagtggaattatacagtatatgtctttttgtgactggcttgtctcacttagcacagcgtcttccaggttcatccatgttgcaaatggcaggatttccttcttttgcatggctggataatattccattgtgaggatagcctccatttcctttcatctctcaatggacatgaggttgtttccacatggctgtgtgggagcaagggggtttcttagccactggagcgtcccattgggatggggcactggtggtgacccctaagcagggatgtgccctaatggacttgcatctgatagggtctccaggccactatggccccatgcctgggtgaggttaagagttaaagagtagaaaacaggaggccagtgagggggcatttttgggcccatgggaaggtttctgaggagatggaagggctgcaggtataggttcccaatatgtccccaccccagttcaatttcaatgaccaagggagatagcagaggtaaagaaaacagataagagggggtcacctgacacctggtggacagaagctgacatccaagaggtgattccacccacctccctcctgagcttcctccttcctcaggtccagttaggcaggggacctggtcagtggtgcctagtcacctgccactgtgtgacctcagacaggagatttgtcctgggagcctccttcccttcatctataaaaggggaatggacacagcagcccagaaggcttcgaggaggaggaggacgtgagaaggtgtgctgaatcctgccctgctgagcatgtaggcctaaaattttacacacaaactgagtccctatgaggaaagggcaagccctctgccctctgcccttcctatgtctgcatatccagaactgcctcaggtggagagggcagagactagggagcacccatagatgctctgatgctggccacagcccttgggggtgacagtgatgaggacctgggtgcacatgtggtggagcagccaagaccagccagagaagagacacactcatgcacacacgtgttcacaacatacacattcacactcacacacaaacacattgaatgcatgcgtgttgacagttcaaggagtagaggacactggacctgggccctgctgacccaggcagggccccactctgatgggtgctgtaaccccagacgtcactgttgctgaacatctgcctgcctctgagttgtggagcagctggagacacacagtggtgtctgtgagtgtctctgtgtgcaggacccttttctaagtgagaggcacatctcagcacagctgactgatcattctcgggtaagtgtgacctgctgtctccccttcctgctgacatgggggcagatgctaccagatggcatcactggcctccggggcgctgtggagggtaatgtcgctgagctcccaccaggtgctttctcttcactgaccatgtattgcagccgtctcattcaccctcacactgacttcgtggaatgggtgctaatgtacccatttgaagatgagatgcctgaggtcagagcggaggcaactgacccagggacccagatgtgactctggactgtgatctcagccctgccttgtgctgtcctgcactcaactcctgacctctgcagccttcctgccttagatacaaaatctgctgaggattctggaccccagtgggggtagaacctggctctggaagagccacaggaatggggggccctgtgggtggggttagaggcatccctcagtccaagtctgtgcaagaaaaagttccccagaggcagggatcttatccattcagactttaagtgtgggctctgatggttactgtgggacccaccaggcactggagttttccagtttgggagcagagctgggagccctctgccctcgaatagttgtggaaaatgaagaaaccctggaggtctggccgaaaggtgacagtcattcctcctgttctctgaggcctggggacaggggtttaacctgcaaggccctctctctgacctgtcctccagacgtatcaccttccctttgtctcaggtattcccaggagagatggcccctctgggtgttctccagaacctgtccccaagagttcacttgttctttggtgacctgggaaaacaaagcctcttcctgtatcaactgctcaggactgtggaatctgccctccctccaccaaagggaggctgctttggagacaatagatcaagccttctccgaaccaaacatcctccttcttgactggtgttattcttcaaatggattcactggccacagtgagtaaagatttgagtggaacagaacactcatgagatttcttctttcctatagaaaactgggcatcttcatggtgtctgaacaatagcaggaggctgatcatatagagatttctggttcctggccctagtctgcctccaggtgtccattatagtcatcatggcccttcaccctgagcaggtagatgccgttcatcctgctgtggagtgtgtgcccatttcaggacatttagggacaacaagtcttgttgtctaggtctccttgttttaaagtcctcaggaaagggcccacctctggtcaggcccagggactccagaagtcctggcagaggtggggccatttggcttggtcccattgtcctgggggtgttggtgaaatgaagttcacccggctggcatctgggagcagatgtatggggtgttctctaaagctctcaggtgccatgtaattttgggagtattttgtcttatagggtggatatggacaaagacatggatatcctgctcgcccaggagtaaagggacatcattgccaagtataagcagacacaggtcaggctgctccctccagggaggcgggtctcacctctccctctgttccctggtctgatggtcctggactccttcgggatgcagggcaaggatgagctgcccacacgcccatacccaacaacttttattttggcctccctcaccctctctccctctgccttgcaggttgctgatccagggcaccagtggacacaggagatgaagatgtttacatctacaaggtcatcagtcagcttgagattccacagtgagtcagtcttctgtcctcccaaccaattgccaagaccagctcggtcgtggagaccctaacccagtggcgctagaggaattaaagacacagacacagaaatagagtgtagagtgggaatcaggggctgatagccttcagagctgagagccatgaatggagttagacccacatattaattgacagtaagccagtgataagcattgcttctatagattatatattagctaaaagcattccttatgggaaacaaagcattcttagcgaggagcagagaaacaggccctggctgatatctgcagcaaaagcatgttgttaaggcaaaaaagcatgttgttaaggaatccccctgcagatgtggagtcaggcatggtcactcctgctggacgttaagaaggtgaaggctgaaaacccaagtaagtaccaggtatggtccttccacactcagccacagcggaagaaacaggccaggccatgtcaggagcccgggtctctagctagaggaaaagtcaagcctgagtgatggtcagtcccatatcctaggcacagacgatggcatgggaaccacaagtgaactgggctctggtgaccctcagtggctttggaaataagatagagaaggatatttctgcaaaaaaaaaaaaaaaaaaaaaaatcttctttccttccagaagtgctgaatgattgctgtttgtggtagtgagccttttgtctgttatgaggctggttccttcctgaggaaccagccctttagccctgccctaaagaaaataaaggagcagggctcctatacagggctctcactgtaaagcaactgcgggagagtgagccccagggaaggaccagccccatcctcatccaccacaggttatcagtccaggtggccacttagggaagggaagagggtctttctatgggctcacactcaggagggcctaggatttgggagcagagggagcagaaaataaagcagcagggcaagatgtcctcagcgaaaataaaccagattgacctggacatgaagtgcaccttcagacaccatgtcatgttttgggagcactacagagtcaggtaaggcctatgggggatggagggtcccaggggagacggaggaattcagaggaataggggcatcccatgcaggagtccaagataggacgtgacagagccccccaagggctctcttggccagggagcagccagcatcacagagcatctactgagctccaaaccatgggccgagctggggcatgtgggtccagaacccaagtggctactgaggaaacaagcggtagcaaacacaatcatgctgcatggtgaaaagttctctctatgacccacaagtacctgaggtagagacccacaagaggggctcagacttcacaggcaacactgacaacaccaaacaccatagaggatgtggagccacaagaactctgtgcattgctgctgcaaaatgctgctgctgctgaatgcaaaatggtacagccgccttggaagacagttgggaattgctcacaaagctaaatgtacttgtaccacgtgaccacaagtgtcatagacgttgacctagctgacttgaaaatgtatgtacacctaaaacctacatgtcacattcactgccttattcattatcactaaaacctagaagctactgagatgaccttcaacacaggtcccaggggagatggaggaattcaggggaatgggcgcatcccatgaaatgaggttatacctgtttggtataataaaattacaggttaaatctataaatataaattataattatagattattaggttacatttatttggtataataaaattatacagtaggtattgtcaaatatgaaattaatatctaatgattgtattataccaaataaggcaaatatgtgtcttttggacttaaggggacctaatatcaaaaaaattaatgagtcaaaaggactgaatttagaatttaattttgaaaaaatcaaatatcaaaactttaaaacacctgctatcacaaaataggatcattggtcattggtcattgtaaaataagtcattcatttaaccaaagtgataactcaaagatttcaaaaaaaaaaagtcaaaagacaaaaccattactctttgagagaggagacttaattttccaaacaataagccctaataaagatagcatgaggccaatgaaatctgtttctcaaatcttataaacaaatctattaaattttaatgatcttcaccatactatataatttccaaaaacctttttgtaacattttataattttttaaatgaaaaagtgggttaatactccaagaaaaccttgttaatctgacacaggagctcagaggttagtcttgcatcagtgagcctttgatactaatctttacagagaaactgtaaccaagataaaaccaattttatctttcaaaataggctcttacaatcgcatgtacccacatcttccacaatagcccctggactttgaggggtaagatagtttcaatttctggccctgtgtttcatgagtgcagtttcttttgattatcatcttctcctggttctgaagatacggttttagaagctttcagtgtttaagatttagcaggacttggtgtcctttttagatacaggagtcaaagccctgtaactcaacagaacaaggactttaaaagcaatacagaacattgtatggatgttaataactttaattttttaaatctcagttttcctaggcaaataaaaaacttaatgacataggaattgtttcaataaaatataaaatctgtttgttaggccagttaccaaaaggcaaaaaataaataaaagacctgcagcaattgcttttccctagacttcaagtcaaaactaatgaaaatggtacttgaattagttagatataggaagggtgtgtcttgcatcataagtgaaaattttcagtttcatagaaaaacttcaaaccaagagcacagaatgttatattggaagaaaatatttcctttagacctttaagataaaacacttttagcatcatgtcacagtagcagttagaacctgaggaaaaaaaattatagaaactgacaagaaagttggagagagcgattatctcaggacttatgaaggggagagaaaggtgaaaacagtgagattcaataaaagttgaaatctggggtaaaaaaattaaaatatcttgtaatttgttaagagtaaattaatatcttaagaaaattttgttcttctagcccattcttgagtggattagcatatttttaatatacagtaagtgcaaaagcacagtctctagaaagactaatttccttttaattatagccaacttgatcaaataaattcttttctcataaagtctctttttacaaaccttactatgacttacacaagccacttatgacatgcctagacttcctgttttatcctaaacagccttctttcctaaataaccaatcattttatcttctttttcttttttttaagatttctttgttgttgctgctgttgttgctgctgttgtttccttgagacaaggtctctctctctgtgtcacccaggctggggtgtagtggcatgatcacagctcactgcagccttgacccacccaggctcaagcaatcctcccatttcaacctcccaggtagctgggactatagatgtgcaccagcatactcagttaattttctgtgttttttgtatagacagggttttaccatgttgcccaggctggtctggaactcccaggctcaagcaatctgctcacctcagccttacaaagtgctaggattacatgcatgagctatttgcatccagccattttattttagaacaaacatttaccatgcaagatttttttctcatataaaattttccttttaacctttcttaccaaaaatatctctttatatttttaactgtctttatatcgctcttatttagtggttccttttatcttgtttcataacctttaaataacctttgaattcaacaaaaattattttcctttaaataagaacatattcttagcaaaatgtttttctgtaatttttttaattgtgaatgacccagacatttaataaatgcctgttatgtaatataactttagattctaaattatattatgcttatttacaagcattccttccattacatttacctaagttatttttaatagtttacctagattacttatgaaaactgtgataatcaacatttaaaggtattttcctgttaatcatttatatagcctgtgaatttcaggtgtttacctaagtaagaagcttaaggttaaacaaatgagtttttcgccaataactcaggataaatgacttatttatcaaaaaaaattacacaaggataattatcttttgagttacatttataattttataaccgtcatgccaaattttgacaccttatgtatattagcatttaatcaagctgacttttaaccactgagctttaaaaatcctttaaaatctcattgctgtaaccgagtacacccattttcctgagacatcaattattattttttttctttccttttcttgttccttcagttccccactccctacttaggcttttaggaatgcaaatatagccttttacctccccattaccggactctccctacagtgcaagttcatctaactacacgctcaaactggaaagtcaacttgagaattaacagttgatttataaaccaatcatgcccactgtggaactctcactctttaggaggttgtctcaagagataacagcctgcccatgaaggtgccagcagtcacaagctgattgccccgtagataaggcacaagagctagcatggaccccccgccaccacccttgctcacttcctcccctgctttttaaaagtgaagccatatggaggacacctgcatttcttcccctaagctagttttggaaataaattactttctttataccagacttcacttttgttaattggactctgcaagcaacaagcgactaacctgcattttggttacattaccatgttttaggtgggacaaacttctaatatttcaaatgtaacacaaatatcaaaccagtaaagactttatttaggaaccaaacccaggctgccatggtggaaaaagggcagaaccttagctactgaactacagcatggggcaaccactattgctatttcagtttggcttggctagcaaagggttgttttgttatgtaaataaagcccttcaggtaattgaaatctttcttgtttcgatggctgatttttcttttttttctctttgtttttccagcttcaggaatttagccagttcagaggtcttgttccccataatttagaactttccttcaggtttgaccaagtcaactagagtggtcaaacccaatggaaaaaagactaaaacaacaaaaacggaaccaaacaaataaacaacaacaaaaaagtaaagcaaaacaaatgattgcacaatttataagattactgagcactctaatggtaaggaggaatcaagaccagctggtagttaatcttaactttcagagaatttccaagacaaaccccatttcagctacttatgtaggaataaggcccaggttgaagattgctctctatcatcctagaagcaggaaaaaactcaaaactcatcttccctgttggaagcaagctgaaactctggaaaggagttgcctgctttccattatcatggattcagaaaaactcatctttttggatgcaagtaaaactctagaaaaggagttgaacagcaaaataaaccttagatctcaacaacattttgagaaatcagggattctctggagatgatacctcccaggcctcagcaaatcgtcctgttggttttgttactggcagcaaatccatatgggtctgcagcaatctcaattcttgccttctcagaagaaagaattcgactgaggggcatacggcagagtgaaagattgaggcaagttttagagccaagagtgaaaatttattaaaaagctttagagcaggaactgaagaaagtaaagtccacttgaaagagggccgagtgggtgacttgagagatcaagttcatggtttgatctttgacttggggtttcatacattggcatgcctcttggggcgggggagtggtttgcatctcttctcccttgatttttcccttggggtgggctgtccacgtgcacagtggcctgccagcacttggaaggggcaacatacacattgtgtttaccaaaattgtacacatgctcacttaaggcattcttcccttaccagccgagtgttcctggagaaaggttatatactggttcaactctgccattttgcctgttagtgcacatgcttaagtccactagcccacctcctgagatcttattgggaagctgctgattaccaacttgaggtgtttctattgggaggctgcctttccctggcaccggctgcagccaattattattttcaagaggcagtttaacaacttcctgaccaccatctgatggttgcctgacattcctgggcgagggtccctctcctgacctattcatgtctgactaattacctattgtaacagtttgaacaataaagatagctcaaggccagacatggtggttcatgcctgtaatccccgctctttgggaggccttgcaaggccagaggatttcttgagcccaggagttcaagaccagcctgggcaacaaggcaaaaccctgtctctatgaaaattacaaaaattagcccggtgtggtggcacaagcctgtagtcccagctactcaggaggctgaggtggaaggatcacctgagcccgggaggtggaggctacagtgagcagggatcgtgccactgcacttcaacctgggtgacagagtgaaacactgtctcaaaattaaaacagataaaataaaaatatagctcatactggtaccatgcacaagtagatttgtcaaaggtcagggccaccttcactcagagtctcttccgttggttgccaacttgtaaacgaaaaagtatgtcagataggtctcaatcagtttagaattttcattttgccaaggttaaggacgcacccaggaaacaggtatatgtacctttctcaaagatgattgtgagggcttcaatatttaaaggtgagaagtgggctagatgggaaagagggtgtggttatccacatgttgcaagagaaaaggagtaggcaggaaaacagtcaattatggattcatctcacactcagtaataggccctttacataaggtgaacataagactagctacttgaggagctatttaaccttctatctgtagctatctgctgaggaacaaaaggaaagacagttttttgcatgactcagctttcagcttaattttttccatttggcatagtgaattggagtcctgagttttattttcctttcccacctcaaaccccacaagctttgcgttgttgcagattgtccctctcagaatattttacaagatggtgaagtgcctaatgaacatttcttttgtcataaagtgagtttggatcctgaagaagccatcatcttaatcaggctttgggatcaaagttccccttcacccgaaccctgaacagcacagcagacagggaaggacttactgagatggctgctcccactctccagcccccactttcctgaccattcctggcaggaagagctgctgagcagactccatgggctgcccacacagggtctggacctagctgtcttcctgtgcccagcagcctgtgagccatcccagtcccctatgtgcagtggtcagcacccacaagccagccttcatagggattcagttcatgggtgttgccctgagcctggcacagtggcctccccagcttagcatctgcagttcgggtcagggtgttcttaacggccctcacctatgccttttctggccacacatgagtttggatgaagcaggagtctcttccatagctccttttcatctgagatgtccatgactggctcaagtgaaccacagtgtcaggagaggggcacggaagctgcaccctaaattccccgggacctgtggcaggccttcctggtgacctctgccttctcaggtgacttctgccctcctgggtgacattagttctcccctctcaagtgatctgtgccctcctaggttacctcagctctcccaggtgacctctgcctttccagatgacttcagtcttttcaggtgacctcagccctcctaagtgacattagtcctccctggttatctctgccctccctggtgaactcaggtcttccaggggacctctgctttcccagatgatctctgccttctcaggtgacattagtcctcctaggggatattaactctcccaagtgacctcttcccttccaagtgacctgtttcctcaggtgacctcagctctgccaggggacttctgcctttccaggtaacctctgccctcttggtgacatagtgtgctcaggtgacattagccctctcaggtgacctcaaccctccaaggtgacgtcagccttggtgaagtctttccatgatgactttggcttttgccagaggtaggctactgcgggggcataagccatatcatgccatgagccactatcctgctcatgttccagaatgaggagacatctgggtgctggcccagctgctggccaatgagaggcttgccaagcatggtactctccaaggtgacctctgccctctcaggtgacacagtcctcccatgtgacattagctcacagtggacagctacccacgaggcatcacacagccaggacaggggacggccacactggctgggtaattgtgacttacagacaaggcaccttctgtcccctgctcattttgagcctccagggtatcccctgctgagagtcccacaggagcctgtgactggccagggacctgacaccccaagtcagatgcctcttgtccccatcagcaaatgggatcacagctgccctgtgaccaccttctgcatcctggtgtcacaaccttctggccctgaccttatgcaggggactcttacaaccctgctggtccttccacctcccagctggccaccctcccaaccaccctccctgcccatggctagaccaagcccagatgacagcttctctctgtcctgtgtcccctgccctgaccccacatccaggagaaggccacacaccctccagcacccctggtcaccccaccagctcccacctgtcctcactgcttcaaaggcaggcctgcccttctggagccatggccctggaagccactaagcagtgcctccagccaggccccaggggcattcccacccctcctctcctggccgagaccacatgatggggtcactggatgggacagtgaaaggccttggggtctggaagcaaccaccactgcccaactgccactgcccaaccgctgctgcccaactgccactgcccaactgccactgcccagcctgatggctccacatctcaggagtaggctctgattccttggggccccaggagcctctcaggagtctacatcccaagatgttctaacttccagagtctccaagcccatcaagagcaagttttgctaaaagtgttctgagagcttatgaagcacatggtgagtggtcagtccctcagctcttccccagaggccctgggtcccatggggttagcagggacaggggaagcctggggctggtgagaggccaacttccagccagggcttgatctggttttcaatggattcaaagtttggcctccttttccttacctggaggggacagaggcactgggaccaggccaagctctggctgagccagggctaggggaagtacatccactgggggcccatgccatggggaggtgttggggcacagccaccactgttctacctcttggggaagggtctgcagtggggtctggaatacagaggttttcacggaagcccaggggaccctgaacacttctattccttctatcaggacaaggaagggttgtgcatccggctttccaccttaaactggtttctatggtgcttcatcgatgagataaggatgcataggagaccccaggccaggtacctcctttccccacagtgctcagctcccccagcccaggggtctggcttccccaggaggacccagctcacccccaccccacaggaggcacaggcaggtctctgcagggcacacaagccaggacctgtatgatgggagctttacacaccagacaccagggaattctgggcagactgggccaagacccatcttggaagagccaaaggagccagggaagccacaagccctcaggaagccccttattctgggaaccacatttctgctgagatgagtccatccctatgaagagctgccggaccttgtctgacccagccttatggaagattgggtgggtctcttcccaagcagagggagcctcaggaagtccagactgaggctacagtgggccctgctcaagccaccagccccgaggttggaaaggccaggtcctcccacacctgctgttcccacagacttccttcatgctcatcctgtggctctgggatgtctacctactgggaggtgagtgtgtggtgacaactatggtatacatggccttcacagccacagaattaagtccctgggtggccaatggtgcccagaaggagcatgcaggacagaccctgggacctatagccaggacagattcctggcttctggtgtgtgatgacctgagagcagcatccacactgtccacatggctctctgctccagcctggaggtagggccagaccaggcctggtgggctgggcagggagtggacccaggtaccaaacccactcctgacacaacccagatgaaaggcaagagtgtgttgagcacttccctgcccaggccttcctccagctgtggttttctgtgaacatctggacccctggggcagccacagtaggatccagcaccgcccagtggtgggtgcctggggcaggaacaaggtgcagacactgactctcccacagacccctcccagcctcatagtcaccctgtccctagaacaccccctgaagctgttcctgtttggcttgcaggagttccttcaggacacactgtcctaggcctgggccctggaggaggacatggtgatgaggcaccctgaggcctccatgggggaactgagaagcatgcactgtgacctgcacacccaggtgggcttcagcaccaagtctcctcctgtgtcaccctgcggggcagtaaatagtgggaagtgcccagacctcaccagccctgctccctgggccttcctccagcccctcctctccctcctcctctaagaagcttctgaaaccaggctgcctgagcctagggcaaaagctgaccttgggtttactggacatgcctcagagacaatgagacgtgagcaagactcttccaagcccctcccctgtaccctcctgctctcactcctgaaagccccagaaggacactggaggggtcagatccatctgtgcaagcccacaaccacacctgtgagtaccagcagccctggagagcagcagggggtcttcactcctgagcacccctccaagggcctaaaatcagtgtcagagaccctaagagaatctagggagagggcataggtgaaaccctggcccagagccagaattgattgctcagccgagtgtgggaacagtccagccctggcatggagatcccccagaggagtggagggtgtctcatccactgtggagataagcccccatattgtgtggcaaaggggctaggtaacagttaaggccccatccatctgagctctgaatcaaggctaaagcccaggctaagcagccctggggcaagagtgtgaggcaggaagactgagtcagcctgaaccctgggggctgtccctggagtgacttgagcttccctgacagcttccccactctaggctgcacacacacctcgctctgggagtagcagcctgcaggagtgtcctcagcattagaccagggggaccacacggggaccctgaggactgcagggacccaggtctgtggggtccagcctggcaaaagcaagatgttctcaatggaaaagctgaccaaatctgctttcctttcagccaaacctgagcaagcacccccaccacccaggcctctgcagatatcccccagcattgagaccctccccaaggggatgggctgcttctccctggcccacagcccagctccagcagcccatgggtatagccctcctgaaacaggagcctcatcctccctcaccctcacctggctatgctgtacccaaggccaaagcccagaggcataagggagcttctgcagagcccaggacagcaggctgctctctgggggccctggggactcagagtgtggccagcccatccccagctcaggatagaccacagagtgcttggtgattcctgcattggaactccctctctaagctccccatggacctggacctcagaggcctgtggttttcacagtagagcttggagcagagatgctaggcccctatcacttccatatgtgccctggacacctctaagatcataggactggcctagcccccaataccagacactgcccagccccctgatagcccagaggtagggccagagacaactctcctgcatgtgatgcctacagctgatcacccttggcagacagtgaacatcacggcccagaaggagccagggcagcacttggcaagctgccccaaagccccagagagctccttagacatggaaagtcaatactgatggggaagctggacacttggaggccactggagggaggggtgagcatggtgtccccacagcccaggccacccagcagcatgccctgcatccatggtcccaacctgtagggcagaacccccctctcaacgcacaattcctagacccagagggccctagcccagactcaacctgagccctgaaagggaaggggcaccaggggtgccttggggcctccagcagcagccaagatacacaggagatggagccccctgtggccctggccagaactagtatttggcttaaggcggagcaagcccccttggagcactgcgtacatacccggggcctatgtgtgcctggcaaggccaagctgatgatgttaccaagctcaaactaccactggccaccttggtgagggtggggcagaaacacgtggaccagccaccaacctcatccattcaaggaagcagaaatggtcaggctcctgcaggataagtggccaccaccagaccaccaatggggcagagttctgaggcccaaggagatggcactggggccctgcttccagggtccacaatctgctccaggacacaagactgaagaaaactaagcaaatgagagtccaggaggctggatccctcatctgccattcttggcagttgcattttgtggtcagaaaaagtcaggaaacttggctctactcactgcaggaggctccaaggtgggaccagagcttccagcatagattcaacaatgcctaagaatgcctcttcttggggaaaaggaccccttccttggcctcaaagcccccacttattttgattaaagcacaataaagtctttgttgttatgtcctgcctgtttttgagttgcccagagctctctgcaggaagccctggacatactggggtggatgggaaatgaagatggcacagcccagaccctgaccagcctctcacagcctccccatcccaaaggccgcagcagggccaagcaccagaaaggccaaggttcccacacaactgtgagccacactgcactgcagcctcccactctcaggcagatgccagggttaagaccctccagtaatttcctgtaattcaaactgcacctgatagggacccccagagggctgggaagggagcaaaagttggagttccagtgacattgctcattcatgacagtctgtacaaagcatccctgagagggtctgctgtcacctgtgtctactgtccctgggtggctggtctccggcagccctcccttcctttcttccctccttccctccccacatccctccctccctctcttccttcttctcttgcttccctcatcctttccatctcatctcctctcagcatctggcaatcccaggtcctgagcctgtgccaaggcgggacacaaaggacaccactgacaacaaggcagatgactagcggggtcggggagccttgtggaatcagagtggatggggaggggctcatctgtgcagcccaggactgctgccccgggaacagtctagaacagtgcagaagtgtgtgtccctgtgtgtgcacatgtgcacgtgtatgtgtatgtgtgtgcgtgcctgtgcacacctgtttactcagttctgctctaagtccatgtccacgaccccagaagatcccaggtatgtcctcactgacgtctgctgaaatcaagcatggcccctgctggtagttattgcactgtgtaatgccatcgtcgggacctcagagcaatagaaaccagtggacccctttaggcttttctttccaatgggacataaagaagttatatggacagaagttatatcctgttttctttccattgattcttttaccacctttctcctcttactgattttgaatgaagggggtttttcatgagggtaaggtaactggcaagaaatgaaataacagccagatgcagtggctcacgcctgtaatcccaagattttcggaggccaaggagggtgggttgcctgagtccagaagttcaagaccagcctagacaacatggtgaaagcccatttctaccaaaacaaaaaaattagccaggtgtggtggcacgcgcctgtagttccagctactggtggggctgaggtgggagaatggcttaagcctggaagtcagagagtggagattgcagtgagctgagatcacgccattgcactgcagcctgggcagcagagcaagaacctgtctcaaaaaaagaaaaaaagaaaaggaaagaaatgagataccgagaaactagcaaagcttcacctggctgtctggagacagcccttgtgtggtccccagcccacctcacaggttctaggctggccaccctgtggcctctgtactgtgtatctggacccaggctctgtgggaagggtacctggtctgacaaacattcctccatttttctggctgcagcttggaataggcccagacagcatgtccaggagatgccagacaacctcactatatcctgtgagacaggcccagtgggccttgaaggaaggggtgagcatgaagctgggcacccagagcctgagaccaactgtccctccctgtgccctggaggaggggcctggcctgtcagtgtagatgtggggagagaagggtctgtggacccaggaagggacattggtaggggactttgagcaccactgctcaggggacatgaatgacagggtgggaggcatctcccatttctgccctgagcacagcacccctttgactcctgagggccacgaggagtccactccccagagctttttgtagaacctgcatatgagtccatcagaggtgagatttgcaaatacttcctccagcctggggcttgtcttttcattctcctcacagggtctttcagagtgcacacatcattttgatgaagtccaattgatcatttttttttccttttatgcatcatgcttttggtgcttatctaacaaatatttctctaatccaaagtcacactaatatctacctttttccttatgcaaattttaaagttttaggccttacattttggtttatgatacattttgaataatggtgccatgtatggactgaagtttttaatatgcatatctaattgttctaatagtatttgttgctaagattgtcttttctccactgaatttgctgtacaacttttgaaaaacaattgaacacatatgtgatggtctattctggactctgtattctgttctattgatccatttgtctagcctcttaccaataccataccgtctgaatttctgaacctttacgataggtcttgaagttaggtattgttagccatcttacttaattcttcttttttagagggttttttatttctaatctaggtccactgcattgccacacacagaaacccgtgcccttgagcatacatacatatgcaacacaagtataaatatatgcacagaacgacaaagtgaaatttatcccaagaatgcaaggctgcttcaacgttaaaaatgggccagtataactcaccatattaacagatgaaaagacaacagcacatcattatttcagtatatttggaaaaagcattagacaaaatccatcaaccttataaaaacttccagtctatttctattcctaaaaactaggaatagaagtgaattttcttaaactgataaaaggcacctacaaaaaccctgtagttgatgtttactggacgttattcttaatgatgaaagactggatagtttcaccccagaggaagaactaggtgaggatgtcagctctcactacttgtattcagcatcctatggagagtctagcagtgcaaagggctccttcctttagtagactcagatttccatctggagtcattattctcctgctagatggatgtcctttaccatttctcaatctgtacatctcctggtgatgatttctttcatcttttgtcaatctgaaaacctctttattctgcctttttattggaaaacaaaattttgactgtgtaaagaattctaggttggcatttttttctttaaaaaaaatactttcatacaacttgcaattttccaacaagaaatctgctttgtatctttgattctctgtacatatatgtctttttcttctctatctagctgcttgtaggaggactcagcttctcgcagatagacatgtatgataaagatgcagtaactacatcaagtgtggtattgtccatggatggataaatagactgatggaatagagcagagggcccacagacagacccacaagagtccaactgtgattgatcaccaaggaggagcgtgatggtgaaggactgtgcttgttataatgtgctggggcctttggataaccactgactaagtgggccaagtggccttttggcttaggctgaagcaggataataataacgttatctattcatagaattgttaaaattacctggttttatatttgcaaagtaattagagcagtattgagacaaagggaatcttcagtgaacatttcctctagtcatagttttttccaccacttgacttcctgccctattcagagtcttatgtttgccaggactcaagcacctccttatggggcagactccacagggcatgatatggtttggatctatgttccccacccaaatctcatgtccatttgtaatttccagtattggaggtcgggcctggtgggaggtgattgaatcatggaggcagattttcccctctgtgctgctctcattatagtgagtgagtgctcaccagatctgattgtttcaaagtgtatagcacctctcccattgctctattcctgctgttcctgccatgtgaagacgtacctgcttccccttcaccttctgccatgattgtaagtttcctgaggcctccccagccatgcttcctgtacagcctgtcaaactgtcagccaattaatcctcttttctttataaattacccagtctcagatatttctttatagcagtgtgagaatggaccaatacagggcatcatggtcagtcctggggaacagcttcctggagtgggaggagctcagtcctggtaacctgctgttcccttgcctgaaaccccttgtttcctccaccttccatctcattcaacaaagctcttgggagaacaactttaaggactccctatgcctcttccttcaaaggtagccagccaagaagtagatggctggttgagccatactgactaccatggacagcagcaacagaaggtcaaaggcaaaggtcaggtattcttttcctggcaggtacacaaggacaactaagggcaggccccaaaccaggaagctgatggccacaaagcggacaatgtggtagatccggatgggtgaacagttcttcaggcagtacaggctcctgatgatcaaagtcaggctggaaatgcccaccacaagacaaataagcatgtgaaatattataaagcctgcctgaaattggtcacatgccaggcccttctcccattactcacaaacctggctaaccacatgcaaagaaagggccagggcccagctcaggatgctcatcacagcagaggtgtgctttgggcggtggcagcaccaggtgggacagaggacacacagaaagctctcaatattcatggccaccaggagacagagactcactgtgtcagagaaataggacacaggctccagaaacatggccacctgcaatgtcacctggtgatacagcatgaggattttctccaacaggatcacagttacacaggagaggttgaccatatcagcagcggccaggttaaggacataggtcacgtaggggctgctcctgacctggaagcagaaaagccagcagaccacaccattgcccaccagcccacagaaggccaccagcactgtcaggatgaaaaccacctgtttgcccaccaaccactcgcctcccgtatgactcatgttcacttgtcctggggtctctgtcctgttgtcccaatccagcttcccagagaacactgagagaaactgggccatggtgggctgccttggctgcctgggcacaccctgcaaagacaaaggttggtaacttaccaggcctaggaaggagagtcagggttgccttctgacctgctgggcttcccaagagggtcctgctgggcctcccaagattggtgggaatctcacagagcaaagtcaaggagaggaatgagtctcctgcaagtgatccatccatcccatatcctccactgcagggtaccctctcctgcttgcccccatccctctctccacctcgttcaggtattcttgatgctgtgcccaacaccaggtgtgtatccatgcacctaggtgcccataaaggaaagaggtgcatttctttacctttgttctccaactctctcattgacacagacagttttcatggcatggttttggtggaggcaccaggcaattcctctgccctaaggttctgagatattctgagtcccacatggggcagttgcttttcagtgctctagggaaggtctacccaacctctctcctgctcacctcccctcaactcctcactttcagcacgagggcctcctggtaggacctttatgttgttctgctgcctggaagggcctctgcacatctgtaagctttgtatcctctttccaatctttgccccagtatcaacttccagagaagcttctgcttcctattaacattgcattcatcacatgctgagtgtctatgcaacttacttacttctgcagaaatccctctgtgggaatggaagatttatcaggttttttattctcttcacaatgttgttcaataacttctccagctcctggaacagggtttgacatagaggactcacttgggtatggcacctatggagagctttatgcagctcagttacacttggggaagtgctggtgacctcttcataaaagcaaactttgcttctgaatcacagaagcttctggaacaaagcttgttctgcaaactgatttaaaaaaaaaggcttcttggactcctgagggagactcacacctgaaccctgggctacgtccacaacaggagcaggcactctcctccacattgccaatcacaggtctttctttgtagaatcatgaggggagggtgaccaacttatcctgctttgcctaggactttcccagtttaagctctgaacatctcttgtcctgaaaatcctcatagccctaggaaaaccaaggtggtttgttgcccaacttgaaagttaaacaggagaaggtcagtaccccttctggaatcccacagcttggttaaacccagtgatctgaggagttcatgctgagactgtgagagctgacctcttgggggcaaatcccagctctttttcatagtagctgactctttctttgcctcagcatccccatctaagtaagggctgctgctatgggatgaattgtattcttctaaattcatatgttgaactatcccagtacctcagaatgtgactgaatttggagacagggacattaaaggggtaattatgtttagatgggtcattagggtaggccctaatccaataggggtagtgtcttcataagtaaaggagattaggacacagacacccacagggggatgaccatgagaagacacagggagaaggcagccatctacaagctaaggagagaggctttggaaagaaatgatcccggcaatctttggatctcagactttcagcctcctaaaactgagagaatgaacttctgctgtttaagccactcagtctgtgatctctgtcatgggagcctgaactgatgatcacatttatgatgaaaagtttacagacggaattatggaaagtctcagaacagtgagatctacctggttctacaaccctgagctgctgaagctttgcttctgaatcacagaagcttctagaacagagcttgttccacaaactaactgataaatgcctgcgatatgcctggaaatattccacaggtgaccttgtggcctgcagtcacatattggtgcatcagcagggtttaggagaatgctagggaccagctccaagtgagcccagtgtttgaatcttccctccttgctgggatgatggagtccccttcagttggcagctctcttgaaatggaagggtccagccccagcccctcccctccctgcacttgttacctagacactcttacctgaggccagggaggaccgcagatctggctcagatctaatctggtcataggatgagtcttggggcttggtaacattggtgcccatggaaacatcagggtgacctgcagttctgtgcctgggccagggtgtcagaactcgtgatgatgacagaagagaagctgcaaacagacctccgtggcccaccccaggccaccaaggcaccaagcaggagcagttgggctctggtccccaacaaagaaaggagatttatagataaaagagtttcaaggggagaggtgacttacccttcaacaaagagaaaatgcccattttggaggcagcatgtggcttcagggacagagccaggcttcccatccctgggctcactgagacctagctcatgcccagagaccactactgaggccagtgactaagcagcacattcttcctcatcacacaagaggaggacacagccctcctggggtgggaaggcttcagtgcctggtgcagccccagcactgggcacagagagatcctagcacctggaaatgtcatttccaagtcgggtcatgagccaagctccccaaggagcataaacaacaaacaggttggatcctgggattcagggagccagctctgatggaagtgctcaggttgatgcagccaaaatagccaagtaacctttgcattgggattgaagtacttgctctggttctgagttgagagcccaccctccccacttaatctttatttgaggtgaaatttacataacacaaattaactaatttaaagggcacagttctgcctcacttagcaccttcacaatgttgtgcaaccaccacctctatctggttccaaaatatttacatacccccataagaaagccttttacctgttagcagttactccccttgtcttcctcctcccagctcttggcaaccccatctaccttccatttctgcacattcacctattctggacatgtcctattagtggaatcagaccctctgtgattttttgtctgtttctttcactcagcctcttgttttcatggcttcttcacagggtagcatgcataagaacttcattccttgcgttagatacaaactaaatatgaatatagaagctgtgaaatcagaagacccaaaaggattttcctagaagtcatagactacacctcagtaatacagtggctcaaatcctacctttaacagaataacacaccctctgcccatctacacagctggggcatttgtgaaccaggggccagagcacagttgtggctcacctgctgggactaccctggaaccccgaatcctgctttctccaggaacctggtttctgtcctgtccccattttcctgagaaatgcaccttccccagtaaaaaatcatgaggtttcaaattccaggaaaatatgtctctgagttaaaatggtttgaaaatgaaagaaggaagagagatcttttctcatacctgggaagtcttggatagaattggtaccacagaggccaatgtcctgagagatgaaagttctgcccacaggtcaggaagcaatctaacgatgtctgatttgaactgggtcctgacaagaggttgtcaatttctctgtgtctgttgggtcttcctgtactggggcaaattgcatatcagggcccaggcctttatctgaaacattgtatctcagcatctcctgatatcccccatcccactgacacttttaattactccatcctgaacaataacttccctcaaaaaagaaggatctttaagacaagttgtcacctgcctccctgtgtgaatctcctagaatgacatccagcccagcccagcccatctgagacaggcaggagagggaactctggtgggcattttgtcaataaacttgagcatgccaggaactcaaatgtgctcctttcattttgctgtcaattgaattgcatttttttttttttgcaaaagatgtggaagttcttgtaaatctgtgtcagaaacttacattggattcaccaagcctagggagatttggctgtgctttgttggagccaatatttttcaccctggtttaccccaccactgacttgctttcttttttttttttttgagacggagtttcactcttgttgcctaggctgcagtgcaatggtgcaatctcggctcgctgcaacctcagcctcctgggttcaaacgattctcctgcctcagcctcctgagtagctgggattacaggcatgcaccacaacacctggctaattttgtatttttaatagagacagggtttctccatgttggtcagactggtctcaaactcccaacctcaggtgatccgcccaccttggcctcccaaagtgctgggattacaggggtgagccactgtacccggccttgacttgcttttatgaggcaagaaaagacatgtctccttgttgcactaatttcgatcaatcaataagtcaattagttcattttcattacatctctctgaatcaattgagagataaattgagaagtcaaaacaatgcccaacaacatagcatctttattcctccctcccctaatgacctgggaagcagtttgtgaccccaaagcacttgcttatatgttattctctccaggaattgaatttactcctcaaagtaataggcacaggcacccatggtcaacacctgtctcctgaagcttatcacttaatggagggaacccaggagtatgattcctccatgcagacagtcagattccaaggagaaaggaggaaaagtccttcaaatgccacattcagccccttcttctggatgccccactcagcaaagtcacttgtggctgatgctggtcagagaagcccttccaaatgggaacatgggtgtaggaaatatgtgcttctcacactcccaaaggatcacaaatggggccctgtgtctcttaacttccttatgtacaaaagtacatactcactagaatatgattttacaacatttccatcattcctatacaatgtgttgggaagtgatcctttctgatctatattttggaagagtttgtatagaattgtattatttttttctttaaatgtttggtagaattcaccagtagagacatctgggcctgggccttttttgtgggaagatatgcaatgacagttttaatgtctttacttcttgtaggcttatacagattttctatttcctcttgagtcaattttggtaattagtttttctagaaatttatccatttcatcgaaggtgtctagtatgttaggataaagttgttcataggatttctttataatcctttaaatttctataaagttggtaatgatgtgcccaatttcatttctgattttaggaatttgaggccatttttttttcttggtaagtctagctaaaggtttgtcaattgtgttgttattttccatgattcaacttttggtttcattacttttctctatagtgttttattttctattccatctactcttgctctcttctttattatttcctttcttctgcttgctttggggttagttttctcttcttttccttgcttcttaccatagaaagttgaattactgattagaggtatttttcttttccaatgtaggcatttacagctacagattttcctctaagcactggtttatctccatctcataaatgttgacatgttatggtttcatttcatttcatgcatattctttttaatttcccctgtgtttttttttctttcacctgttatttgtggattcctgaagtttccaactgttggtgattactcattcaattccattgtggttggaatacatatattgtattagttcaatttttttttaatttatagataatttgtgccctcccatctagtctatcctggagaatgttccatatgtgtttcaaaagcgtgtataattcatttgttgttgtcaagtaggtcaagttggttgataatgtttcaggctctgtatccttgctgattttctatctagttgttccatcaatgattgataatggagtgttgaaatcttcaactatttttaatgatttgtttatttatcccctcaattctgtcattttcatgttttatgtatttgggggatgtgttgctaattgtgtgtatgtttataatcctcatatcctcctgataaattgaaattttatcattatagaatatgcctctttatttctagtaacgctatttttctcaaggtctactttgtccaatattagtagagctgtctcagctctttcatcatagttttctacatggtatacttttttccaccctctttttttaacctattcattttaaaatcaaaactgcctctggtagactgcatataccagacattggacatactaggtgaacatattagacgaacaattttaaacacgttcaaagaactaaaggaaaccatgtcaaaagaactaaaggaatgcatgagaatgatatctcaccaaatacaaaacatcaataatgagatggaatgttaaaaaagaaacaaggccgggcgcggtggctcacgcctgtaatcccagcactttgggaggccgaggcaggcggatcacgagctcaggagatcgagaccatcccagctaaaacggtgaaaccccgtctctactaaaaatacaaaaaattagccgggcgtagtggcgggcgcctgtagtcccagctacttgggaggctgaggcaggagaatggcgtgaacccgggaggcggagcttgcagtgagccgagatcccgccactgcactccagcctgggcgacagagcgagactctgtctcaaaaaaaaaaaaaaaaaaaaaaaaaaaaaaaaaaaaaaagaaacaaataaaattcagtaattgataaataaaatcgtagaaataaaaacttcactagatagcctcaataacagatttgagaaggcagaagaaagaatcagtaaatttaaagataggtggggaaattatccagtatgaggaacatgaattaaaaagaagaagaatgaacagagtttcggagacctgtgggacacaatccagtgtaccaaaacacataaacgagaattttcaggagaggatagaataaaaggaacagaaggaatatttaaagaaatactagctgaaaaactccaaattcaatgaaaaaatgttaatctacactttcacaaagctcaacaaacttagataaaataaattcaaagagattcacacatagaaacattataatcaaactgccaagaagcaaagaaagaatcttgagggcaaaaagagggaagcaacttatcatgtacaagagattctcagtaagaataagaactaatttctcatgaaaaattacagagtcaggaggcaatgggatgacatattcaaagtagcaaaagtaaaatactgtcaatgaacaattctaaagccagcaaaactattcttcataaatgaactagaaattaaacattctcagattttgaaaactgagagaagctgtaattaccagacctgtcttatgggaaattataaaagcagtcttgcaggttgacatgaaaggacactacatagcaactcgaatccacatgaagaaatgaagaactccagtaaagataactacatgggtaaatataaaagacagtataaatgcaatttgtttgcgatttcctctctcatatgatttaaaagacaaatacataatgaaataattataaatctgtattgataagcctacaatgtataaagatgtaatttgtacggcaataaaaacacaaagaagcagaagagaatggagctgtatggaagcaaaggttttgtgtgctattgaaattaaattgctattaatctgactaaattgttataaattattaattgcaagatccagggcaatatttaaaaaatacctcaaaaagtatagtaaaagaaacaacaaggagaattaagtaaaacactaacaaaatttatttaacatacaaaggcagtaataatggaatagagcaataaaaaacacgatataaagaaaataagtagcaaaatgacaggtcaaaatcctatactatcagtaattacattaaatgtaaatatattaaacaccccctttaaatggcagagacatgaaaaaaaaaaagaaatcctgtcattcatggcaacatggatgaacctggaagacaccatgttaactgaaataagcaggcacagaaagataaagactgtgtgttctcactcacatatggaagctaaaaaatgttgagctcattagaaatagagagtggaattttgattattagagcacaggaaggatcgaagggaggagagagggaaggataggaagagattggttcatggatacaaaattacagctagataccaggggaggaggctggcaagatggtggaataggaatagctctggtctgcacctcccagcaagattgacccagaaggtggatgatttctgcatttccaactgaggtacccagttcatcttattgggactggttggacagcgggtgcagcccatggagggtgtgccaaagcagggtggggcatcgcctcacccggggagcacaagaggtcaaggaactccctctcctagccaagggaagccgaagccttgagggactgtgtggggaggaacggtgcactctggcacagatactgcgctttcctcacgtcttcgaaacctatagaccaggagattccctctggtgcctatgccaccagggccctgggtttcaagcacaaaactaggaggctgtttaggcagacaccaagctagctgcaggaggtttattttttctgattaagtcaagcagcagttctcaccgtggctaattaggcctcccactgggacatttggcaatgtctggagctggttttgattgtcacaattagagaggatgcactactatcacctagtgggtagagccccgagatggtgctaaacaccctacaatgcacaggacagcacccccaacaaaggatgatccagtcaaaatcgtcagtagtactgaggtggagggcactgatctttagatcttgtgactaggctttttctttctgagtaacatggaaactgctgaaagattttgagataagaagtggtatgatctgagttgttataaatgggttactctggcttccatgttgagaatatactaaaggttaagggaagaaccagaggattatttcaatcatccaagcaagagatgttgacaaggacagaccagagtggtggtcctaacagtgataacgacttgtcagtttcacaacatatttttgcaggtagagccaatagaatttgtgggtagattatatgtgagtgagatgaagaagagtcagtatcacaagatttttgtctgagaaactagaagaatggattttcattacgggagatgagaaaggctacagaagaagcacattgtgggggagagggtgggtagtaaggagctcagtttatggcatgttaaatctgagatgtgtattagataccaaaagctgctggtgggtagacaattggacataggaatctggaggttaggagaaaaatccagcctggaaatataaatttaggagtcatcagcatatagatggtgtacaatgtcataagactggatgacggaagtgcatgtaagaaaggaaagaggactgaaccctaggcacagcagggagaggaggagaaaccaataaaggagattcagaaggagcagctgggagactttggtgatttgaagctgtcagtcagctcagactgccataacaaaataccataaactgggtggcttcaacaacagaagttgatttctcacagttctggaggctgggaagttcaagatcaagatgctggctgattttgttcctggtgatggctctcctcctggcttgcagacaactccctacttgctgcctcctcacgtggcctttcctcttttataaggaaactaatcctatttggccctcacctttgtgacctcatttaactataattacctcctaaaatgcccatttcaaataccatcacattgaggattagattttcaacatatgaattttggggggggacacaattcagtccatagcagaagtgaaaggcatgttccaaaaaggaaagctaagtccactctattgaaaagcttctaacaggtcaagtaacatgaggactgaaaactactatatcaatgtggaggtcagtttgtgaccttcgatgaaaggtttccagtgcagaaaccttgttggagccaacccgaaagagaattcaaggacttggatggtagctagggggaagtgaagtcaagagaagattattttctgatgagtgaaatcaaagtatgtttatgtattgatggggatggtccactggaaggacaaattatattacaggaaagaggggaaagattagagtaatgtccctgaataagtggaaagggatggaatatagtgggcaagtgggggtactggcatcagacagatgcaaaatagtatattcctagcagtatcagaagaaaaggtggagtcccatatgtgagcacagatgcaagtaggtgaacaggtgggttagtaagaacttctctttttattgctttacattttttcagtaaaaaatgaagtaaaatttttatctgagaaagatgatattatttgagagagaggagtactggggatttgaggggagaccagaaagtatgcatgagttacgtaggagaggggaaagtgagtggactaggaaaatatgattatcaatgacattagccccttcctcttaaagtagtggtcatgaatgtaaagtgaaacctctcagtgtggctattggctttccttcggccacagtcagctgaacaaatatagggagagagtaggactatagttggatttaaataggaaagcaatttagctgaaagagtgtaacaagtgaaaagggcaggaacattgatgtatgcaaaggagtaatagtgattgacgagacagtctaagcttgatagagaactgaagatacaaggggcgtgaggggccacgatgaatttgcggacctctcactgaggaagaaactgagaggaaagtatagaaagataatctatgaggatactgaattcaccaagaatcatcacagtactggagagagtgagaggggatcagggacaaaaatcttcaaggacgaaggaggagcaaagggaaagagaatgatgagagccacaagtggggaggtggactttggagcaaagctgatgacataacagtcaaagctacattcaaaactaataatgacttcaacaaatctacaaaattcctgacagaaagggttattttccttgttttacagatgatgacattgagagtcactgaagttaaacaattagcttaaggtcactccatcagagaatgaaattctaaaccagttccaattgaatagtagaaatgttaatgagagggaattacgctgcctttggccttcatacactgccagaggcacactaccctaaagggactttccctccagaatttcctcttccccactcttggggactcctctccggacaccttcatgcaaagtactaatgataggagtgggacatctattccccagagctccatcctctcttctaaataacagggaacgttgagtcccctgttttttctctagtgagagcactcatcagcatgcttcctccttctctctaactgtgtcctttagatccaggagggatatttgctaccaccaccagctaatgctgatttgctaccagcacaaggcccaggtccttgtctggtctgtaccccattacaaggttctccaggaacagacatcaccacctctgcctagatcctgaaatttcacaaatgtaggttctttcttacccgttctttttattcctctatttacaagcacaatgacacccacccctcatcttcttcctgaaatacctggctctgatctcaggcatccattccagaaatcaacacagctatgcaattgcatcttttattaaatactcccaactccatttcaaatccagagaatccagagcaggagcaagagaccaacctatcatctggaaactcaaggtgtaaacattagtgccaaagattagtcatgaaggtaagttgggtattacagtgccctacaacaaaatggtcttgtgccgagagccacattctgaaataccaagtgaagtttgatgacacattatattatatatttcacaacagatttgtcttctagatgtgtgagggagatgatgggtttatgtgtacaggtgcacacatgcctatgttttggggaatttgtgcatacatgtaacaagaatgttatctgtgcagttttattattgtgtgcctgttttcatggtgtggcatatttgaagaggaatggtttagagcttgccaggctgaacagttatgtgtccgtgtaatcaccgcattaaagaatttgaccttttgtaactcaacatctctagccaccattggtctgtaagcctgaatgtcacctctcctactttattcatctctgatatgaccccaaattataaaatgatctataaatataggtaagactttgcatgtcctttcatactccacagtctctagcacagtggatcctggttgatcaaacaggaaggacctcgaagttagtcaaatataagtggaaaacctattaagcatttacaaataatgtggccttgggcaagtaatttaacttcagttactctcctaacatactctataaaataaggctattgcctaatattcaagtgagttaagattagagttaataaatgaaaagagctgtaaatgttcatagcagttgtatcactgcctagcataagaaccccttaaaaacctgtttcttaatttgggaaacagatatgacgatagttagcatttattaaaggatgacagttaacaactgctatgtgccaggccttgttctaacagcttttcatatttagcccacttaacatatttctattttcatatgaggaaactgaggcagagagaggctaagtaacatacccaagtttttccagctagaaaatggcagagccaggactcaaacccaggcagtctggctgctgagccctggttcttaattatgacattaatgcttattctgcccagtgaggataaaatgagtgaaacataaaatcaaacaggatgttttggtagggagcagtgttttttccctctgaaaaatgaaaaattaggttattgtgattttgtaatttacagcagtgaatatgatgtgaaaaataagttatccatataataatttatgtcaggagtcatgcagcagaaagatttctgtccatcacgtaaactttcatccattacataacccatatgtttctgtaccattaagacacttggttcaacaagacccttggagaatgaggttccttttgttccctggggttctctttttattttatttttggattaatatttgatagtaaagccaaggatttgggacaggaaacttagatgacatctagttcaaactccttgatttacatatgaaaaaattgagacagagggaaatgaagatttccccatatcatataactggctaaagggagctatgtaggtaaaaccaagatgtcctgatattctagtctaccagaaagtgttctttttttctacccaacttattcctgatttaaaggctagtatacgtgtgctgatctcccctcagtgggaggggcatggacgttgggagtagtctctattcacaacaaattaaaaatcagtaatcagccgtataatgggttgtgttagaaagtaaactaaggcccaataaaatatttaagagtttatttgagcagtgatccagaagtggctagggagctccccagagagaacatgaggaggaggctttttaggacaaatagataaaagcaaagataatatttcattggttacagttatacagttacacagttatacagttgccttatttggtctatcccatgaggaagtcctagttactaattacgtttttgttggctgcttctgattggttgagcttaagttctgtgtttctttaacataggcatttacaagaaataccacaaataaagtttcagacatgcttgcaaatcaagcaaggttaaggtcacttaggaggcccaactggctctgtctgctcaaggattcttctggcctcgtctccattttacatgaactgttgcataaataaacacagagtacctgaaacaacggaggtgatcattctgcctaccgagtgttggccaggccaagcttggagtgttgctcttattcttagggagtttatttttaagtaatctcatctgtaaatgggattacaatccacaaactgaccttgtatatgattccattccttctcccagcccagccccacactccaaggttttccctttgcttataaggggtagtcacccttttttatttcgaccttccaaacattctgggagttttcctcctttaggccaactacagcgcagaggagcgctttctcctgctgggtttctccgactggccttccctgcagccggtcctcttcgcccttgtcctcctgtgctacctcctgaccttgacgggcaactcggcgctggtgctgctggcggtgcgcgacccgcgcctgcacacgcccatgtactacttcctctgccacctggccttggtagacgcgggcttcactactagcgtggtgccgccgctgctggccaacctgcgcggaccagcgctctggctgccgcgcagccactgcacggcccagctgtgcgcatcgctggctctgggttccgccgaatgcgtcctcctggcggtgatggctctggaccgcgcggccgcagtgtgccgcccgctgcgctatgcggggctcgtctccccgcgcctatgtcgcacgctggccagcgcctcctggctaagtggcctcaccaactcggttgcgcaaaccgcgctcctggctgagcggccgctgtgcgcgccccgcctgctggaccacttcatctgtgagctgccggcgttgctcaagctggcctgcggaggcgacggagacactaccgagaaccagatgttcgccgcccgcgtggtcatcctgctgctgccgtttgccgtcatcctggcctcctacggtgccgtggcccgagctgtctgttgcatgcggttcagcggaggccggaggagggcggtgggcacgtgtgggtcccacctgacagccgtctgcctgttctacggctcggccatctacacctacctgcagcccgcgcagcgctacaaccaggcacggggcaagttcgtatcgctcttctacaccgtggtcacacctgctctcaacccgctcatctacaccctcaggaataagaaagtgaagggggcagcgaggaggctgctgcggagtctggggagaggccaggctgggcagtgagtagttggggaggggagaaagtattaagccagaacccaaggatggaaataccccttagtgagtcagtttagacttcaggctgttcatttttgtatgataatctgcaagatttgtcctaaggagtccaatgggggatatgttttcctcccgtgaggaaatgtttagttcttgagggaaaatccctaaatcctctatatactcaggtttagggaaggaaaacctacccctcacaactccacgcgcagggaaaatgatggacgtgatgctcgcctttagcttcctccctatctgatggaagaccatggaagacctcttggtctctgcaatcagaagtctcaagttgacaagaaaatcatagtccctaccctgcaggagagggtacatccagaaaaagcgaccatggactctattctcagaaatcagtccaacttagtgcagacctggccagatgaccagtgccctccccggggcatttcacccataaatgtgatgaggaaagcccataaatggtggtgaattttgctgagtggggttaagactggaaacccccctgcaggagttggttcttgagcaagttttaaagaaacaaggaactaggatgagtgtggaagaaggcgggcacgtctcagcccgtgaaaaaaactcacaggtgatcagtagtgagtcatgagagagagagcaagagagagagtcagagagaggagtaaatggagggaggaagatggaggaagggactcaagttctcaagacaggaacagggatctcctcatgaaaaaaagaagagaggaaaatgctcaatcagcagaacctgagcagaatattgaggtcaacccagaagccagctcctcacccaccctcacccagactggcgccctcatcctggagaagacctgctagaccctaaggcaggtaggagagagggtggtccacagtcccccagctttagaaagtttgttcgctcccaatgtccatctacccctaggaatccccactagttaaacagaattgctagatccctgtggaaaatacctttccttgcccaccatcatccccagaaataataactattttagttgggtgtgagacatagagaataaaagggggcatggtgccagacttcatttcatacaaatagctttaaaggagaagaggggggaaggagtttaatttagtttctaaaatgtttagtaatttgattgtgatcatgtcagagcaactaattcattttataaaatatcatttcactatgctctataagtagaaattcaatttggttcaaccattattgagtgatataaataaagcactggacttaacaaagacagaaatacagaaatcagtagaacatggatcccaacctaaaacttactctcttgtcataaaggaaaggagataggagtttttgcataaataacaaggtatcaagacagaattaaattccaagctggctttgaatgctctattttgccttaaaaatttatttactagtctcagtaatacattagtaaaaatcatgtcacttaattaattgtgttagaatcaaagaaacatagagttgggcaatatacttcatcctacccatcccacccaaatcttactctactcatctcattctcattaattttgggaaatcatcagaagatgtgttcgttgagtaagagattaaaagaaataagctttttgacccctgccaacaccccatgcccagggtggtcaccctccaatacaataagatgccaggaagagtaagttgccctttctgatgccgtaatctgccatcatcttcccatcttccagtctctttccattgcaagtcacaatctgggtctcagggattatacccgtcttagtctcgatcattgctttcacttgtgccactgagctggaccttcgcacctggaggaggtgcctctttgcctcatcacctgactccacaagaaacaagggcagctcctcatcactgggcttcaccactttcagggtaaggtggatggtcttctctttgtcaatgccgtaagatgagaggcttctccgtggctttaagatcttggagcccagcaaaagaacctggtcctgcacaggaaccttggtcttagaccggacatgttctttgatttttttcacgctgtcatatgggttggcatcaaaggtcattaaatcccattcctcggaacggacatgcacctgggaagtgaaagccacaagacagttacctaggatgcctgcctcctttacacttctactccccaccacaatggctccccctcttccactatctatctggtcctctagctcctattcagtagccagtgtccctctctttcttggaacttcttttttggaattaccaagttacaacacaaataagataatttgtcccattcctttataatcacacctttttttcgatcttgagaatggaaaataaaatcctgagcccccaaccaactgaacggacgctcttttgctcagggggaccctagagaaactttaaaaacttagtcattgggccaagggtggtggcttacacctgtaatcccagaactttgggaagctgaggcaggctgatcaattgatgctgggagttcgagaccagcctggtgaacttggtgaaactctgtctctactaaaaatacaaaaattagccagtagtggtggcaagtccctgtaatcccagctactcaggaggctgaggcaggagaatcatttgaatccaggaggcagaggttgcagtgagtggagatggcactactgcactccagccagggcaacagagtgagactctgtctcaaaaatataaataaataaaacattcagtcatgatggaacaggaggttggatatgcctcattgtatcttctcccttttgcagtttagacacaactgaccagcaaagttagagattataagactgagagaatggattctttgtggcaataagatagcaaattataaacaagaccgagggctataacaggcaaaagttaagtcatgcatcccttacacttaaagaataaactatgttctgccacaaagttttttcttttttctctagcagctaaacaagcactggccttgacaggaacaatattaaaacaattacagctcaccctgtgttggggaacacaggctaactgaccccgtgttccacaagccataactacagttttaattggacaaaagactgatttcagtaattttctcctgataagagaccactgaccatggactggttctggctagtttacagaagctgtgcatttgaatgcctttgtgtccctgcttcaccttttcatgtataaggcctaactgtaatgcaattaaatgttaagtctccacttcagagtgaccatgggtggtatgtaacatgcaagcttattcaatatgcatgcattaggaccccctccatgaatattcattgcctctgctataacctattggatatgtatacttagcaaaccccttcagcataaattcctgtgtcacctttcctcctgcaaagtgcttgcttttggttttcaatcagaagcaaaacttcccagcctgtcagaatggctaccttgcagactataacctttcataagaaataaactccccttctaaatttatgaattgtgtgattttttttagttgacaatctttacatttcgtttttctgtgcatttcaatggatgtaaaaaacatacctttatccatctcaaaatgtaattagtgattttccaccttatttacctgcctctcctatccagataaagtttgtcaaatgtcaacaagtaaatacgaggcttcaaaagatgtacatcagactctaaaaacaactctcaaagagaatttccaaaatatgacagcctcatgaagatactcatagccataggataccctctgtcaatacttcagaaggaaatcctgggtaggacacataatcactgaactgttagtttcttttcaaatatcccactgctttataataataactcacatactaccgtgacactatgttcagtgtttcttgttaatttatatttcttgtgtttttatttctatctaatgagagacaggactagctggatttcctaggccgactaagaatccctaagcctagctggggaggtgactgcatccacctttaaacacggggcttgcaacttagctcacacctgaccaatcaggtagtaaagagagctcactaaaatgctaattaggcaaaaacaggaggtaaagatatagccaatcatctattgcctgagatcacagcgggagggacaatgatcgggatataaacacaggcattcgagccagcaacgctaccctctttgggtcccctccctttgtatgggagctctgtcttcactctactaaatcttgcaactgcactcttctggtctatgtttcttacggctcgaggtgagctttcgcttgccatccaccactgccgtttgccaccgtcgcagacccgcggctgacttccatccctcggatctggcagggtgtccgctgtgcttctgaaccagtgaggcgcccattgccgctcctgattgggctaaaggcgtaccattgttctgcacggctaagtgcccaggttcttcctaatcgagctgaacactagtcactgggtccacagttctcttccgtgacccatggcttctaatagagctgtaacaaccaccacatgacccaagattccattccttggaatccatgaggccaagaaccccaggtcagagaacacgaggcttgccaccatcttggaagcggcctgcggccattttggaagcagcccaccaccatcttgagagctctgggagcaaagaccccctggtaacactaatatagaatgtgatctcctttgataagactagggcctcactcacagaaggtagggactatatctaagtcttacttcaatagctggaaaatcctaaaagatgggaaaactcacccctaatggccacttgaaagcctgagaagacctccctcatactccattcagaaatattttcccaatctagatattgcagacatttcttcactggaagatctgtgttaagcattgccttaattccaggttctctccatagtgcatattttcttatataatgtaatgtgttagatcattaacaacttcagatgaatgagttttgtgaagctctcctttgagaggagagggaagattaagtttaagaaccttaaaaaatgttaccataatttcaaatctcaccagccctgtggaacacaaagctcacccccactttttcttctaccatttatccctaagagtagctagtccaatgttttatttaaaaaagaacacagaagccagataaccagcttctcttcagacaatccctcttcccattctgcaaatgtcaatgccagcctcttctcctgaaggatgcctgcccagccccccagagccctgagtactgcccagcccccgtttctaagatctctccccaactcttgaaagtgcttttcctttccccatcccctttatcaaatcccaacttacacagaggcaggaagcattgggagccatctctgcagacaaggggccagaaaccagagacagaaaaaggactttgcatgcagcttatataccagagttgagttggaaatcccctgcctggattgctgtgtttgtccagctttgctgtgctctttgttcttgcatgctcccatgaattttctttcacttttgctgggcaggagttaatagacaaagaatgctttctgatcacatacttctctcctcaagcaatctatttgcaaacctcattccaaacatgggatggtctttctgtgttgaaaacttttcccttttctcaggaaagatctttgtctgttgaagccacctggatctatacccacagcccaaacctaagctgcagatctctatgtctagctgtgtctgtgtctatgggaattctcgttccttgaattcccggcatatccttgaacaccccaatctctctgccatctccacgccactgagcatgccttttcctccaactctatccccaccaccatgaatttataagaacacacggtgtaaacagtatcttcgtcaaaaagccttccctaactcttttcctccccatcctgggttatgtgtccatcttctatcctctacacttccttcaaatgcctctcagagcatgtttcttcaacaatagcatcgtctgcttgtctgtaatctttagaaaagagtaggaatcttgggggtcgtgattgtgtcttaattaacttgtatctttagcactgttccagcatgctgtcaggcacaggaaataatttataaatgtttactaaatgcacaaatgaattaataaatgaatgaaaagtaagtaaataacaaaaaaaggaaaagtaatatttggtgagtacttaaatttcaagaactgcacaacatattattaaatgttaccttatttactgtttcagcattttaatgaagtaagtacaggtgctccttcacttatgatggggttacatccctgtaaacccattgtacactgaaaatatccaaaatcagaaatgcatttaatacacctaacccaccaaacatcatagcttaacctaacctgccttaaacatgctcagaacacttacattagcatacagttggacaaaattatctaacaaaaagtgtatttactactgaagtgtgaaatatctcatttaagttattaaatactgtactgaaagtgaaaagcagatgattttatgggaacttgaagtaggtttctactgagtatgtattgctttggtatcactattaaataaaaaatcataaatggaatcattgtaaggaaccacctctattagtatccccgttaataagtaagaagctacctcatccacaatcatattagtagtagctggtaagcaagggttcaaacactaatctgtatttctatagtccttgtattcttcctatattattatgttatttcagtgggaaaaggcagggagaaaagtgctactggagttgggtatttccagcatggggttactgtgagggcaaatctaatatactctcagaaaaaactaattcaggggattccctacccagagatgacctggattctgggaaatagtgccctttcaagaaaacatatgaacaacaaacctggactctgacctctctctctctctttactcttcccttcctatgggaaattccctccctgcccaaagccagggccaggactgtcccagacaccttggtgcccctttgctgaccacaggcaggacttcatcttgggacctgacctccttgcttcttacccagtgtcaatctgacttttttctgtctctctctatgtcacaataagttctttcagagacagatctcttttcatttgctgttttagtctcttttgcatactataaaggaatacttgaggctgggtaatttataaggaaaaaaagtttaattgattcatagttcctccaactatacaagaagtatggcaccagcatctgcttctggtgaggcctcaagaagcttttactcatggtggaaggtgaaggagagcaggcgtgtcacatggcaagagagggaggtaagagacagtgggaaaaatgccaggctcttttaaacaaccagctctcttgtgagctaatggagtgagaactcatttattacaatgatgacagccccaggccattcatgagggatctgccaccacaacccaaacatctcccagtgggcccatttccaacactgggggtcacatttcaacatgagatctggagagtacaaacatccaaactacatcatttacccctctgacaaattcagaaaaccaactaaagtgtcagaggtgtttgaaccagagcaactccatcttgaataggggctggataaaataaggctgacatctactaggctgcattcccaggaagttaggcattctaagtcacaggatgagagaggagatcagcacaaagtacaggttataaagaccttgcaaataaaaggaagcagtaaagaagccagccaaaacccaccaaaaccaagatggcaacgaaagtgacttctggtcattctcactgctcattatatgctaaataaaacattaacatgctaaaaaatattcccaccagggccatggcagtttacagatgccatggcaatgtccagaagttactctatatggtctaaaaagaggaggaaccctcagttccaggaatttcccacttctttcctggaaaacttgtgaataagccaccccttgtttagtatataatcaagaaataaccataaaaatagtcaaccagcagccctcagggctgctctgcctataaagtagccattctttttttcctttactttcttaatacgcttgctttcagtttactctatggattcaccctgaattctttcttgtgcaagatccaataacgctctcttgggggctggatcaggatccctttccagtaacaaaagtaaaaagatgatggtatgaagatcttgccaagttataaaacaattgtggcggttatctacgagtgtcccaatgtggccctggctgacgggatgctcttgggcctgtcactgcccccattgaagcctacttgaagcctacttggaacagatgtctctttctagtctctttaataacgtccatgaaagagtttctaaactgctttgagatctagaatattgcttcaaaaatgccaaccaaactcagtcagaaagctagtgtgaattctcatttattggtgattgggaaaaaagtctacactcaaagaagaacagtttgaaaatacctaccaaaatttaacatggacataccaaaccaagacaaccaaatgcctatcagtattagggaaataggtaaccaaattgtagaatatcataagcagcataaatagaaggatcatacctgcaaacaacgatacagatgaatgtgctagaacctattgagtgaaaaaagtgttagaaacaaatgcttattccacggtgccgcaaagaaatagcactcagacataaattcaattttctcagcaaggaatttttacttctatagaagggtgtgactcgcggatggagtaatggcaagagcatacctggacaagggaggggaaggagttcttattcctgaggcaggtagcccctactgctgtgtcgttcccctattggctaggtttggaccacacaatctaagctaattccgattggctattttaaagagagcaggggtatgagccagagcggcagggtgggtagtttggtgggaagggtggttacagaacaggtgactcaggatgattcaaatcaaagcaggtggccgagggtgactccggatggagcaggtgaccaggggaacagatatgaaccactgattagaactgacaggaaagttgtttactgaaactagaggcaagagggtgaagagaacccggaagctcaactttcaaatggagaatcaaagaataagagagatgaatatgctgacatactgattctttgaagagaatcttggagttcactatatctaacaaaagcaagatgagtaagactacataaagtatgatactctccataaatctcaaaagcaagcaaaactacatagtgagacagagaaaaagaggaactacttgaaattcaggatatgtctgctttttaacaaaaatgaagcccaatctaaattttgatataagctacttgaaggagattttcaacaggaagtaagagggcattagaagccctgatattatttcatcttgccatattcagaatctgaagtttaaccaagagaacttaatgtttgttaaagcaatttattacttgagagacataccgtatattcactttattaaaggtaaagtaataatatctaaaacaaatgttccaaagaaaactaaacataagcaaaactgaatatagtatctagaactacatatgtaagcaataaggctcttataaaaatgtaaaaaccatgagtgttcattatgctactattatgttttatagtgttacattatattattctatatgggttacatttatttatctgtagtatcaaagattataataaaaatataatttaaaatttttcatgttcatatcctctagctcagcaattctgcttctaggaacttatcctattagtactcttttggtttttttttaaggagtatcactcttgcctcccagcctggaatgcaatggcgcgatctcggctcactgcaacctccgcctcctgggttcaagcgattctcctccctcagccttctgagcagctgggattgcagtcatgtgccaccatgcctggctattatttatttatttatttatttattatttttatttttagtagagatggggtttcagcatgctggccaggctggtctcgaactcctgacctcaggtgatccacctgcctccgcctcccaaagtgctggcattacaggtatgagccaccatgcctggccctattagtacacttatatatgtgtgaaataagccatgtacaagaatattcatgtgaaataattatttgcaactgaaataaatgggaacaacacttatcaatagacaactaaataagtgctggtgtatacagttgaattaaatttaaaagccaagttgcaaaatatatgtataatattttgttatttagaaaggaagaaaatatacacatatgctaaaatgtgcatacaacatctctgtgaggagacactgactctgcaagttgcctgaggagcaggaatgagaggtggactattcattatatgtcttatcttattattgttgctattttttagttttgcaactgtgcatgttttacacattcagataggcagatagtatgggaagggatagtatattttttatgtagtcatcagctcagaatggagctggctataagctatgcaccaatgggaaccagtttcagtgctcatcactagttgacaggcaaagggccatgaaaagttggtggctatagtaggttaactattgtgattctgtgccttccctactccccaaaatttattttccactaatcttttacatactgcaaaatttagaaacattgataatatagcccataatatatctgaaagcaaagaaatttataattagctaaaatcagagaccaaacctaatgaaaaaaaaaaagtaattctgagacaattgctgagcctggtacatgggactgatgtcaatgtgcaaaaattgtccaacctgacaaagcaactggaataactaatgcagtcataagtgcaggatgatgtgttgaccaatggcgcatttccactttgtagcagtcaggccatcttggagtgaatccaggctctgcctcctacttctcatgcaagttatttggtactttcttttgtcagctggggatttcggatttcacttaggattaggctctgctaccattaacagacatctgaaaataatgtgcctttaactaaaaccccaaaaggaccagatcttagaagtcaaaatgacaaccaaggcttaaggagttcaccctagaaccaagaaaaaactgcaatgatccattccagcaaaatgtaaagccagtttttcagaagttcaaagtgataagtgggtaatatatctgcttattaaacaagattcaatacgcttcagagaaagataatagaatacaaaatagataaaggtaatagaatacggaatctctgtaacatattactcacatcatcaagtgtaaaacaggaaatcaccaatcatgtgaagaaacagaaatattagacaaacagttttaaatcctcaataaaaacaaacccaaacgccaccgaaatgttagaattatcagatggagactttaaaatcactatagtattttaaagaatccacagggaaagatttatacaatgggtaaagaaatgatgaattttaggagacagatgtagaaactgccattttaaaaagccaaacggaaatgctggaactgaaaaatacaatatcgttgacccttgaacaacaagggtttgaactgcatgggtccattgaatgtagatttttttcagtaaatatactggaaaattttgtacctttgtgacaatttgaaaaaactcgcaaacttcatagcttagaaacatcaaaataattaagaaacaattaggcatatcataaatgcataaaacatacgtagatactagcatactttatcatttactataaaatatacacaaatctattataaaaagttaaaatttattaaaactcacacacaaatacttataaacaatcataaaatacagtattaaatcataactgcgtaaaattagtcatagtacattctgtcctactataataattatgtagccacctcctgttactattgggtgagctcaagtgttgggagtatgggattaaaatgtcatgtaatactaatcattcccacgtaagcagttcgtcttctctttaggaaaaagtgatgtctcacggttcttgcggttgtcctgtttttgttttgtttgtttgtttattacagagttttgctctgtcgtccaggctggagtgcagtggcacgatctcagctcactgcaacctctgcctcccgggttcaagtgattatcctgcctcagcctcccaagtagctgggattagaggcatgcaccaccacgcctggctaatttttgtatttttagtagaaacgttctttggttcaagacggccaggctggtcttgaactcctgacctcaagtgatccacccccctcggcctcccaaagtgctgggattacaggtgtgccaccgcgcccaggatcttgtgtatttttaattgtgtttagtgcaattccataaagcctgaataacaccacgagacccatatagtgatgctggaagttttccctggagacagagaaaagccataacattacaggaaaaagttgaattgcttgatatgtgctatagattgaggtctgctgctgcagtttcctgccatttctgactgatgtttcatctcttaacagatgacacaaacttacataattgataaatacggtattgtactgtcagtgtattttctcttccttataattttcttaataacattttcttttctctggctcatgttattgtaagaatacagtatataatacatacaacatacaaaatatgtgtcagtcaactgtatatatgatcagtaaggcttctggttaacagtagtttattagtagttaaggtttaggggagtcaaaagttattcatggatttccaaatgtatgagggggtcagcacctctaacccacgcattgttcaagggtcagctgtatacgactttctggtaaaaagaaccaggagtccttggagagatggttgatcccagacagaggaaagagaacatacaagataaccctggaatactgtatgatgccagaaactaaagaagtcattaaaaaaaaaaatgaggacacatcaaaaaactcacagtaatcacgttaaaggatttccccatagccaagtctgggaaaatgtaaacagcaaagtaaataatgagaataatgaagaaagaataaaataaacatccaggagtcattactggatatgaataaagaaaataaacagtaaacgaataggaggagagggacagctcttacaaaattcaaaataacaaacataggagaaatgatgaaagttatcattaggcaaacagcccaatagtaattgttacagtcaaaactcatttgtggatgctaaaattagtaggcaaaactataatgagaaaaagatacttgcataatctcaaagtattaccataaatacttattatgttacttatattattataagatatgactacagttttaataagacaacacagttaaaaaaatgaaaaataatttgaataaaagacacgtaaggaccaataaagcacatgataagatgtttaacaccattaaccatcacagagcaaattgaaacgacttgagggagcacttcacagccgatagaatgcctaaaaccaagagactgacaattccaagtattaccaaggatgtggaacatctggaactctcatcgctgtagggagtgtaaatggcacaatcactctggaaagcagtttagcagtttcttataaagataaacagacagcaaatgactcagaaattccaattctaggtatttacccaaaataaagaacacatgtgttcacacaaagaacgaagaaccatatacaacacaactaactgttctctccttcttcttcttcttcttcttcttcctcttcctcttcctcttcctcttcttcttcttcttcttcttcttcttcttcttcttcttcttcttcttcttcttcttcttcttctttttttcggacccaggctgttgtgcagtggcatgatcatggctcactgcagcctcaacttcctgggctcaagtgatcctcccacctcagccccccaagtagctgagactacaggatgcaccacgatgcccggccaatattttgtattattttgtagagacagggttatatcatgtttcccaggctggtctcaaactcctgggctcaagtatcctcccaccttggcctcccaaagttctgggattacaggtgtgagccaccatacccaacaattgtggcttctttcatagcagcccaaaactagaaacaacccaaatgcccatcaatgcatgaatggataaactgtggtatatttatacagtgaaatactattagcaataaaaaggagcaaattactaatatatgaaacactatgaatgaatttccataacaagccagataacagaagccagaaataaggcatgaagctaggcatggtggctcatgcctgtaattctagcattttgggagtccaaggtgggtgaatcacttgagcccaagaattcgagaccagtctgggcaacacagcgagaccctgtctctacaaaaagtacaaaacttagccgcgtgtggtggcctgcacctgtaatcccagctacttggggggttgagtccaggaggttgaggctgcagtgaactgtgatcacaccactgcactctagcctgggtgacaaagtaacaccttgtctcaaaaaacataaaaaaagtaaatttcattgaagtacaaattacgggtaataaaatgcacacattttaagtatattgttcaataagttttgacaagtgcatacacttggataaccaataccccattcaagatatagagcatgcattttcattattctagaaagttatcctatgccctgtcccagacaaccaatcatctgatttctatcttgctagatttgcttttcctgttgtaggaaagttatgtcagtgaaatcaggtggtatgaatgtatgaatgcttgcttgcttgctttttttttttttttttttttgagacagggtctcactctgtcacccaggctggagtgcagtagtgcagtggtgcaatcacggctccctacagccttgacctcctaagtatattgaacaatatacttaaaatgtgtgcattttattacatgtaaattctatcttaaagaagtttattttattttatgtttttttgagacaaggtctgactctgtcacccaggctagagtgcagtggcatgatcacagctcactgcagcctcaatctcctaggcgcaggttatcttcccagctcagccccccaaggagctgggactacagatgaaggccaccacacccggctaagtttttgtacttttcgtagagacaaggtcttgctatgttgcccagactggtctcgaactcctgggctcaggtgatccattcctcttggcctcttaaagtgctgggattacagatgtgagccaccatgcccagactgaagttgattttaaaagcagaaatgagctactgatacttgaaacaacatgaataaattgcaaaataattactcctagtgaaataattcttactcaaaggagtatatattattccatttgtatgaagtcctagaagaggcaaaactaagtatcaaggaaagaggcaagtggaaggtttgtaggatgatggaaatcttctgtttcttcattgaagtcatcaaaattcatcaaagcgtatatttcaaatctgtgcattttattgcatgtaaattatatccaaatgtctaccagtagagaagaaacaagaaataacgaagtcttacatgggttcaaatgagacttgagagaaaagaatgggacacactcaggagaggtggcaatgagaaaacatgaccttgtgctcctcaatgacacagaggagcagaagtgacctttttacttaccacagggagcaccaatgctggcacgtttcctctgaatcatctccttctttcttaatcatcattagcaccagtggctaattaattgtctgtgaactgtgacgctctggagtcttgggagaattaacaagccatttctctccatgggatgggagtcccgggatccctccctccatcacttcaccacgttttcttctctatctccactaccattaaaagacaggttaacttactaggttgaagaggagaggttgtgggcaaagagcaaccttcagccttacaggtccagaagaaggatggtggtggggtatagtttgtgcctgactctagagccaacccacctgggttcaagtctcagctctggctatataattctgagctaattatttaacctatgttttagtttcttcatctgaaaataaatatagaatatagaaatattatccaggtcatacagaggttgtgaagtgctttgaaaggtgtggcagcagcattagaagtcaacattactacctgagccctaatccaccaccctttcaaaggtgcccaacactcctgactttgcttgtagatttcattgtgaggattaactagaggctcactcagtctagaagctcgttgtcagggagaagctccggcagcaggcaatggggagattgtgacatgattgaggaaaagttataagtttattcttctcctactgtccattaatgtccacatatcgtcaatggtagagctaccccaggagcaccagatttggaatcaaacaggactcagactccaggcctggtcttcatcggctatgtaaccttgggcaagctacttaacctctctgcgaccatttcttcttctgtaaaaggaagatgatattaactacctcaaagagttatgagaaccaggtattcaggaaatgtttagcatggtgcctggtgtataggaagcacacaacagatggtagctgccaaagtattaacgtggttttcactaatgaattggagaaaagaattgatatttcattcccttgtagcacctagtacacaactaggtctttggtgattaataaagaaataaatacatccgtgaatatgaaattaataggaagagagtaaagttgtactggacttttgtgggtgtccaagaaaaattaaaaagaccagaagaaagagagtgagaacaaatacacgttgtgaaacacagaacaagagagaacagaaagagagtcaaagaactatgtaaattgaagagactgaaaaatgacatagagtgaagcaatgaattaccaagagtataagagtgtaagagagggatgcagaaagtgtattagaatgatggttgacagataaataaggaggagttggctattttttaccaacacaaagggtgtaatgttataagacaatataggaatgattttgtaaaagtaataattgaaatagtcattgcgtcttcaggagtaggtagtaggtatgattagggaagggcacgcagaaggcttttaagatttaaacaatcttttgttaaaatattcaacaatattttaaaggaaaaatttttctcagagtaaaaagaatataggaggaaggaaacgaaaaaagagacaaatataaacaggttgaacaaataaaaagatgagatggggcttttaaacacacaaaaaagagacactgcaatgggtagatgctgccaacctatagcctctccagccacctccccatcaacttgcccagttcctgcctctcaactgccagagtggctgccaccgtccacccatatctgagttggccctgtgtgctgaaactctcttcaccttctcaaaaacacagtcccctcctccaggaagcattccctgattcactcaaccaccctactcattttctttacagatctatctctcacctctagccccctaccccaatatttttgccttatttgcctgcaatgtttcaagttttctgctgatgttgaatgtactacccagggtttttcaaagccatgagactactctttcttccagcccataagctcctccgccttgaatgaccacattgttcaataatttgaagtagactccttacttcagtgacttaggataggctactaaagaggataaagtcagacctgacatctaagtacaatatgtgactctcaactggatcctacgtggaaaaaaaaaaatcctacaaagaacattattgggacatagagaaaataagaatatggactgtgtgttacataacaatactgtatcaattttaagtttattgaatttaattgctgtacagtgttaattaagatcatcttgttgtagaatatgaatactaagacaataaggagaaagaggcatgatgtccacaagttattcccaagtgactcagagtaaaaatgaaaatacataaacatattgagtataatgatagtgaaaatgagtaaaaatactaaaaattgatgaatttgataaaggttatatagaagttcttggaactacacttgcaacttttctgtaagtttcaacttatttcaaaatcaaaggtttttaattgcatgtgaataaaattaaccgagcattttcaaaagcaaaattctacttacatgtcccaaactcaacatggtatgtttttactactatattttatcttacatgaaaaggagaggatattgaaatctatttcagctttctaacaccaaacatcaattcttcaggatttttttgcagttacagaaccagaaaataatctttctgactgacattatattttttcttatttttacatattacacataatggaaaatttaggcaggacatttcatttgcaggagaaatgtttgttcttagtttaataagtcataattttttttgaaagacctaaatcacctgactgatctttctagcagttgagtcatttcacatacagaagaaatctccacagtccacatttctatcactggtcaaatctcttgcaaaagtgtaaagtagatagaatgtgaatgatttgagaaaatttatgcccaccactagaaaacatgatgaattctctagtaatgtttacaattaggaaactcactgaacacacatttctttgtatttccttccacacataacaaagggaaaattcagtagtagcatagcgatcagaacataataggtacttaataaatttttgcaaaattaataaaaactaactagttagctgatctatgcttcacatcagacgttttgcattcaaccaggaagtcagaggcaccagtgtgaggctcaatccgttgttgagcacattaatggtttcctcactcccactagacaatgtttgatcagaaggaacaggggatgagaaggagctgcttgatggtgatgagactgggaaaggaacgctgggcgagcagagacaaaagagaaacactcacctactgggacctcacaaacacccaggctgagttttaataagacaggttgaatcacactggggtgacagcctcatccttccagatacagagaggaacaggccatggttaaccaaagctccgcaccaggctttctccttctgggcttctctgaacacccagcactggaaaggactctctttgtagttgtcttcacttcctacctcctaaccccggtggactcatcatcctgctgtctgtgctggaccccaggctccactctccaatgtactttttcctctccaacctctccttcttggacctctgtttcaccataagttgtgtccccgggatgctggtcaacctctgggagccaaagaagaccatcatcttactgggctgctctgtccagttcttcatcttcctgtccctggggaccactgagtgcatcctcctgacggtgatggcctttgaccgctacatggctatcttcaagcccctgcgccatgccaccatcgtccacctctgcctgtgctggcagctggcatctgtggcctgggtcattgggctggtagagtcagtggtccagacaccatccaccctgcgcctgcctttctgcccccatcagcaggtggatgattttgtctgtgaggtcccagctctaattcgactctcctgtgaagacacctcctacaatgagatccagatggctgttgccagtgtcttcatcttggctgtgcctcagcctcatccttgtctcttatggagccattgcctgggcagtgctaaggactaactgcaaaagggcagaggaaagcttttgggacctgctcctcccatctcactgtggtcaccctcttctacagctcagtcattgctgtctacctccagcccaaaaatccctatgcccaagagaggggcaagttctttggtctcttctatgcagtgggcactccttcacttaaccctctcatatacaccctgaggaacaaggaggtaaccagggcattcaggagattgctggcgaaggaaatggggctcatacaaagttgagggagagctgtttaatgtgctttctaaattaagaagaaattatttatccttttgtgaacaagtttgagctcccaagtatactacctttcatacacccatcacagtgtttacaatgggtcacagtatatgagtgtgtgtgagagagagaaagagacagagaaagactaagagtcaggtaagaggaggtaggtatctttaattaacatctaaagctcaaaaagattatcatacctgcccatttttaatatttaatttctatatttttattttcttttcaatttggtttttaactctcttctcccctacaggttctccaaatgcaccatgcctatttctggttatgtaacccctctccgattgttacattatcatcatcattttaccatcacttgtgattcttttttttttttttttttttttttgagatggagtctcactctgtcgcccaggctggagtgcagtggtgcgatcttggctccctgcaacctccgcctcctgggttcaagtgattcttctgccccagcttcctgagtagctgggactacaggcacatgccaccatgcccagctaattttttatttttagtagagacggggtttcaccatgttggccaggctggtctcgaactcctgacctcaggtgatccacccgcctcggcctcccaaagtgctgggattataggagtgagccacatcacccagccacttctgattctgacaatgtcttctttcctttgtcatcaggatggttcatctccacttgcttgaggtggactgacaggaagctgacactcagagaatttagtaatttcacccaagaacacacagcaatttgttagacctaaattgagatgcatatctgttaacttaccaagtgcatgctgttggttttacaccattataaatataccaacatcattaggatttatacccaaatgggttatcaggcagaaaactctatttttccagtcctagtaagttttctgatcatccagctttccagggatcacaacactaatctcctgccaaatcctgaaaatgtgctcccattcctggagatgattttcctttacctcttctcaacctctgcatgacagtgaccatgaggagttgtgagtctgctcttcagtggctacacagtgctaacagctgtcctgcatccattttctagtgcagttctgaaattctgaccaacctctactagccaggcacaaacatgaaatccaattgtaagtaataaagtgctgcaatggagcctggatggagcaagggcctcagaaaaaagggagcagcagtgtaagccccaacttctatgaaatcttatttcctttttcaagttgatctacattcattacattctcaaagcctcacatgaatggaatggagagtgtgatggaaaaatctgtttagaactgaaccattctctcctctttcctgtcaggaaagaggttatgctgtgataacaataccaatcctcagtgacttgaaacagcataggtttatttcttgctgctgctgcatgcccattgtcatccaaccagaggttctgccttgtcatcttcacccaaagatgtggactgacagaacacccaccatctcaaacactcctaggtgctgggaaaggaggaaataataagcatgacaaatggcaaactagcacttagtttccaatcggaagtggcataacactttgactcattggtcatttgccaaagcaaatctcatggctacatataacttcaaggtgaggggaaataaaccaatcatgtggcaggaaagggaaccagaaatatttggtggatgatatgaatgactactaactggctctttgcctccagtcttgaccgattgaaattgattatccatgttgaaccagagtaatcattccaaaatacaaatttgaatatgttactcccttagccaaaaataatatatagaatccccctgcaataaaatgtggagcccaaactcctagatcgggttcctgttttccagactttaccatccccacctcctaaggctcaaccacctagaatcctgcaagttcacacaactacctgcaagtgcaagtgtatgaaccacaccaggctctctgccacctttagcctttgaacgtgctcctccctctctttggaagactctcccctccagctcctctctaccaccaacaaaaagcacttcccatgaagtaacaggatctttttaattgtctacctctcaaagtacacagtaaggaaagtgagggtcagggttttggctcacttatccttatactcttagtgcctggcatagtatctggcacagtaggtatgtaatgaatatttattacagtcacccctcagtatccccagggaattagttccaggacacccctcagataccaaaatctgcagatgctgaagtcccaaagttgaccttgcagaactcacaaatacaaaaagtcggttctcacatccatgagtttagcatcctgagaatattgtattttcaattcatgtttgcttgtggatgcagaacctgtgggaatggaggatagactatatttacagaaagaaatcctagggcctgcgtcctcacgaaagcattggcctccagcgtgggctaacagcagagcagggcggagctggcccatggttgcagacctctgtgccagcctcccctagacaagagcgccgtgtcgaggagaagaaatcggctcaagctctgggcccatgatgcctgctccttccaaagactgtggcagattacgccaactgggatccggcggtcgcaaggtctagaggagtcaagaaagccatcaccaacgtcgttcagcaggaagtaaaatccctttgtgtcttggaagcctcccaggttcctgcagaagaagctgtttctggagctagtgagccctatgacatcatcgacagcagtaacttgaagaagagcagacatggaagagaaatctgcttttcactttatatttttgcctgtcttttaaatgttacagctgtgtgtgctttacatattcaaaataaattgtgtgtatgtgtgtgtgtgtgtgtaaattttaagcagttaataggttcaaggcagaagtggctacaagtttatgccccagtaagaatcagttccagtgctcttcattaattgccaggcaaaatagccatagtaatgtagtaactagaataaaatttaaattaggttagttataaacaccctatccattatcgactcccaaagctgcttcatccatgaatatttaatatgccacaaaactatcagagattgctaatatatcccataatataatatgaaaccaaaagatttttcaaaaagctaaacttgggagagactcatagcaaaatgacatgtaattctgaggtcatcactgagtatggtacttgagtctatcgccacatgtgaaaagcatctgaatataatccaaaaagctattgcagtcatgggctgcagaataatgcggtggccaagaggctgtaatattgtgatataataagatatacatatttggcctttgatcccagttcctggcacagagttcctaaggcccttgtaattccctgagcaataggggtgctaggagagtcttttgttctaatatttggtctttgaccaaatatgtcagttcctaacattgagctctaatcccttggaatttcctgggtaacaggagcatcttttgttctaatgaggtgaccccttgggggacccctgaatggggactctgactagaaggaccaagccatgattagaagtttgaaactttcagctctaccctcatcttccagaaaatcgagagtggctagacattgagttaataatcaactatatctatttgatgaagcctccacaaaaatccctgaactacagagctccgagaacttccaggctggtgcacacacagaaatgctgagagggcagcatgccccagaagctctgtaacccttcccacacaccttttcctgtacatctcttctattttgttgttcatttgtatcctttggaatatcctctataataaactggtaaattgaactaaagagctttcatgtattctgtgaactgctctaataaatcatcaaacccaaggaggggattgtgggaacccccagtagggttcccagtaggtcagaagttccagaagcttggacttgtgattggcatctgaagtggggagcagccttataggatcctttaacctgtgggatctcactgtatctccaggtgaataatgtcagaagtgaattgaattgaattataggacaccaagttggtgtccactgaagaatgtattggtcagtctggaagaaaaaccaacatgttggccgggcgtggtggctcagccctgtaatcccagcactttgggaggctgaggcgggcggatcacaaggtcaggagatcaagaccatcctggctaacaaggtgaaaccccgtctctactaaaaatacaaaaaatcagccaggcatggtggcagatgcctgtagtcccagctactcgggaggctgaggcaggagaatggcatgaacccaggaggcagagcttgcagtgagccgagatcgcgctactgcactccaacctgggcaacagagcaagacttccatctcaaaaaataataaaataaaacaaaacaaaataaaataaaataaaaacgaacatgttttggtgactagaagtgttgaatgttgagaatatagtaggagaaaatggtcagtttgggggttttctacaaatacacagagccctttcgcattgcgcagcatccaatttgaatcctggacctgcaaactcatgcccaggatatagtgccatatcaagggcagcatttgcatgtttctggcaggccggacgttcagtagctgcaggagttagatcagtgttggtgagtgaaagccatgctgttgaacacatacagacctgcatcctgccaccatagttactgccttcataagtccatttttaccagcactagggtggcctgtggagaagactgcttagtgtgaactggcctatagtcactgtttacttggtttagaagaggtttagagcctcttctattgtggatgctttctagtgggcattagcatgtaacacaaagatattcacaattttcccaatttcataaataaaaagatttcccattttcataaacctatccaagtgcctcttcctcaaatttcattgttcttcatcttctaaacctcctccttccaagcacttgaccaaccaaccaagccatttgccactgcccatgtattcacaaatattcttccattaggccattattctttctacacaaaatagataatcaggtgcactactcaaagctttgcccattgggaagatttacaatttctactgtcttccagaactactcttgagtgtggctataatgcagcagcagtccattttcagctcacaccaatgtgttgagcagatacatccatgaaccaaggtcatcttatttttcctccattaaccaatcataaagtacccctccccccccatgacagattaaagatggctgcaaactatcggacaatcatcccatcaggagggctatctatttcccctccccttgaatctgtgctagtctatgactgttttgacaaaaacagcgtggcagaagtgacaccatgccagctctggggccagcctgtaagagaactggctgttcctccttgctatcctggagtcctgaatttccaagtaaaaagtctatcatgctgggcagaccatgtagaaaggccctgagatagcatgaagacagagaaaatgagcccaaacttacagtgaacccaccaaggtgccaggcatgtgagtgaagctgtctcggaccctctagagcagtccatctgccagctgaatacttccaagggatcccagctgatgcaacatggaatataaggaaacccagccaatttcgttccaaattcttggcccacaacatgtgagatacaataaggtttgtgttcatttaagccattaaatttggggagactttgttatgcagcaataaataactagaacactcccatgagccactggtatgagcaagttgggaagtaccaaggccacagcgtggaggacatgggaatctgggccccccacttcagcaccttgcatttaccctccagttctgcccatgactgatgcaggatatacgacttctctcttacaactgatgatgttgcaaccactagacctcatcacttgattgatttgacaggacccagctcatgatggacagttgtagcctaatagccatttgatgtctcatgatcaggagctctgtctctagtaaggcccaagagcaagctaggacttgtttcctaatggggtttactttcctgcagcagacagcatagatttgatgaagaaccccagggatctatgttgtgattttcctttcaaggcttgcccaaaatgccacactgtatcttttcccaccactgatacctttagtgccccagagtctattgagtcacatgaccaaagcactaccacacggctgatatgacagcttagaacagctgcggaccccaggtctgctctgggcttcagtcagtcgctagtaaactgttccatgtggtattcccatgagtgtggaatatgtttcctctagatcctaaataggacaaccaagcattctctaccctggagaagaggaaggagaagaccaagattcactgctggaagaagaaaacagcctatgaggctacagaaacaggcagaaaagaacgtggagaagaaaactgacaaatacacacagttctcctcaagacctatggactcctggtctgagcctaataaagactgtttattccaaaaaacacctctgtattataaattcttctgtgtaatagtgtgttactgtgcatctctttccaattctgcattactggtgttaagtgtgaaatgcaataatgtgttcttactttagagggatgtcctggcacaaagtctaaaaacttcaaagatgtggaggatgctgaatcttcacagggtgtatttcccactctctggagtgcatttgtcttacgagtgccgccaatatgcttgccctcatggctcattctgtttggttaataagatattgttgatacagtggaacgatgtcatgttttgtggaatgtccagaaggtccacgtccagtggtgtgctgcatgcagctagctcatactgcctcatggagccaactgttaaattttcagaaattgtgcaaaccagttgttaaacatgactattattttaaaataagttattttaaggcataggtaacaaatccctaagctcttcattttctaggtatttaactatcttatcatattttccatactcttctggttatttatatctgttatgtctatataataaagatactaaataatgttgtctgtataataaaaatattctggattggtgatgagcaacaatcaccatctttcgtttgagtctcatggccatgagaccaaccccatgcactgctctgagacctgccagccactcccattcctggggtgcggtcctcctggttcagaagtgattttccattaggctatcttttaatttaaacatgaactctgctgtgcccatcactgtctgtgtgcagtcacaggtagagggagagccttcagatggcaccctcagcacttcccaaccctttccttccctctaggccagaaggtggtggtcgtacaatgcgagagcatcaacatttctggcaagttctacagaaacaagttgaagtacctgggctttctccgcaagcggatgaacaccttctggaggccctgccatttctcggccctagccgcatcttctggtggatggtgcaaggcccactgccccacaagactcaccaaggccaggccgccctcaaccacctcaaggtgtctgacggcattccaccgccccatgacaagaaaaagctttggtggttcctgctgccctcaagcttgtgtgtctgaagcctacaagaaaatttgtccgcctggacaccgagcttatgaagttagctggaagtaccaggcagtgacagccaccctgaagaagaggaaggagaaggccaagatccactaccagaagaagaaacagcttatgaggctacagaaataggtggaaaagaacatgaaaaagaaaactgacaaatacacacaggtctcctcaagatccatggacttctggtctgagcctaataaagactgtttgtttattcctcaaaaacaaacaaacaaaaaaaaaccctctgtattataaattattctgtgtaatggtgtgttaccatacatttctctacaactctgcattttcagtaatctcacattgacagtttaaaattggccatggtgagaatatttacactgcagaaatcagcaaatgatgtaaatcaaggcttttttgcctggacttgcagcacatccatgtcccattggaccctattatgacgggagagttttaacatggtactgaagcaaaaatgtaaatgtaaatgtacacttatatccatacctgtaaattcaaactgcctttggtctttcttcctgatagtatttgaaaagaacacattcagccaggcacggtggctcacgtctgtaatcccagcattttgggaggctgaggcaggcagatcacgaggtcaggagttaaagaccagtctgatcaatatggtgaaaccctgtctctactaaaaatacaaaaattagccaggcgtggtggcattcgcctgtagtcccagctactcaggaggctgaggcaggagaatcgctcgaacccgggagggggaggttgcagtgagccaagatcatgccattgcactccagcctgggcaacagtgagattccatctcaaaaagaaaagaaaagaacacattattcaccagattaatagccatataacatggacctgaaaccgtgctaatcaggcacaacagctgtaattacagctatttcttggttgagtttgtgctagtctggtcatctttcaagttgcatctgatatttgtagtgaccagactggtgaattaaatgtgaaatatgatagaaacaaacccccgcaccctttaaaggtggcctcaatcagccatttcccttgaattgtgatattgttcttgattcactgtctttgcggtaagaggtgtagattcagggcttccacttcaatctgtagctcgtactccacagactaaagaactatgtggggattctgccaatggccaagcatgtgcattccagttacagatttagagactgcagaaatgactactgggtagatccatggacctagtacatgccatttattagctgatctcataggctccctttctaatggaagagaagcataacgattcagttatatgaagattggctaaatgttctaagtactctccaaacccagagctttataattctctgttactacagtgtgctccatctcagaataactaaatagaaaaggaggaagctgagaactttaaaaactgaggtcctgaatagatgaatcataagcctgagaggactatcaggatgcccgggactcactggaggtgggagtagagacactgtcctttttcttcctgttgacagaaagaagcaatgagtgacctcttttacctaccacagtgatgactattgttggcatatttcctatagatattcccctgccccttttaccataatttgtggctaatgaattgtctgtgggctatggaccctagagtctcagcagaattaatgagctctttccctccgtgggatccctctaccaccataccatgtcaacatttctacctccaatgccactaaaacagaggcacacctctgcctagactgagggggaaaattgttggcaaagaactcaatggcaaagaactcgatggcaaagaactcgatggcaaagaactcaatggcaaagttctgaccttggcttcatcctccctgcagagatttggtgggctttggttggtgcaaaccctctacagttagcagatttgggttcaaacatcagctctggtgcttactaactatactgccttgggaaagttatttatatttctttgtttcaacttcttcatattggaaggaagagaataatatgtagagttgtgaaggataatcagcagtgtagagtaaatgtttaataaacaacttggttggtggcagatggggagagccctaatttgtagtgtttgccaattttcatagtgtaaatattcctgccatggctgtctcaagccactgatggtttaataactgtctcacaaaattcctaaaaatttactaatcaagagataatctgagccagctccagctcatcacacacatgtgtgcttagaaaagtgccagatggtcagcattagcaatccctattgtgaccagagatgcagttgcccattcaaggatgcccattcctttttatttttttgtttcttcctgatgtacaagtggaggctgggcaccagttaagagctctgtcatggggaattgctggtaccagaagagatttttatttgattgaaggtaagcagaacctttgctctttggctgtgagatatcagtttccgcctatcctcaacactggaggaccagatttggagttaaacttactctaaaatcctagtcctagcacttattgactaggtaaccttctacaagtctcttgtcccgtctgtgactgttcactttttggtaaaattgggataattttatctctttgtagggtcactgtgagaaccagatgttcagggagttgtttatcaccatgctttgatggtagctactaacagcaagggtagctcatggtcactagactatcataaacccctttcaaaggacctcccaactccttccccagctcctaacacaatgctggcactttggggctcaagaaatgaataaatgcgtagaccaatgcatgaatatttcagaaggaaaaggagtaggagaaaaataatgagagtggaaaagacagagaacaaagagggaaagggaaacagtcactaagaaaggtgtaatctaaagagattcagcgatatagcagagaaaggaaaggaatgaaatgccaagataatgacaaagttagaaatgtagaaaattaattaggatgacacatgatggataaataagaaacaattggctattgtttaaggttacatgcaaagaattttatattacaaagaaaacaaaggagggggcggcagccaatgagcatgaggtttcttttgggagtaatgaaatattctggaagtaaatggtgttggttgcacaacttgtgaatatactttaaaccactaaattacacacttcaaaagggcgaattttatggtacgttaaatacatctcaaaaaatgaaagcgaaggcataattaaaaatttagaggccaggcacagtgactcatgcctgtaatcccagcactttgggaggccgaggcaggcagatcacctgaggtcaggagtctgagaccagcctggccaacatggcgaaaccccgtctctactaaaaatacaaaaattagctaggcatggtcttgagtgcctgtaatccccgctacttgggaggctgaggcaggagaatagcttgagcccaggaggtggaagttgcagtgagcagagatcgtgccattgcactccagcctgggctataaaacgtgactctaaaaaaaaaaaaaaaaaaaaaaaattagaatggtggtgacatcttgaggggtgacaaattgagaaaattgagagatcagggaggggcacacagaagcttctaagatacttgaaacatttgctcagttccttaacctagttgtttaaatatgtaacaatattttgaaaattaaaaatatattttaagtgagaaaagaataatgggaaaaacaggaagaagacagagacaatggcagagagtcctggcaaaaagggagatgtgatagagcttaatacaagatggggaccctgtaagaggaagacattcctgccatcctctgagctccatggcacgtttgtggtgtggcccaccatctcatctcctcccctcatggccttcctaaggtcctgtaagaccctgagtccttgtctctgacctgccagagtggcttcagtctcccacccccagccctcaactgaccttctatgccccaatacatctctattttaaggaaaaagtccagtcacctcctctaggaagctttccctgatatacccaaccaaattggtcagtcatcctacagaacctttactctcattcacccagtacattggtgttactggcctttaaattttggactctctttttggtggtgtctgaaagactacaagatttagggagagtgattcttggagtctttcgataatgttcctgtgaaccctggtgattttaacatgcttgtggccactcttgcctcctacttgtaagctactcatggcaaggacgaagcatgtggaccaatttccacccctccctgaaagtcagttggttcagaaacttaggttgctaaaaaggccagggcaaccaacctgatctctctataagtagggatatcttaaaacaaaacaaaatctctctcatagataaaacactgtctctgataagcttacttgcaaatgaaaaaatacaaaataaatggaatgtacagagttctataaaattcattcaaccaatagagcaataattgagcctacagagacaacttatcagaaaattcattcaatataccttacgagatcatccaatagataagagacaactctagaacagcattcagaacatagtggcactcaataaatttcccctgaatgaatgaattaatgaattagtgcatattttaatcagcctcctttgccctcacccaggaagtcagaggcaccagtgtgagtatccatctgctgtccagtacattcatggattcctcactctcactagacaatgtttgaccaggaagaacagggaatgagaaggagctgctggatggtgatgagccttggaaagggaggctgggcgagcagagacagaagagaaacacctacctgctgtgacctcacaaacacccaggctgagttttgataagacaggttgaatcacactggggtgacagcctcatccctccaggtacaaacaagaacaggccatggttaaccaaagctccacaccgggcttcctccttctgggcttctctgaacacccagggctggaaaggactctcttcgtggttgtcttcacttcctacctcctaaccctagtgggcaacacactcatcatcctgctgtctgcgctggaccccaagctccactctccaatgtactttttcctctccaacctctccttcttggacctctgtttcaccacgagttgtgttccccaaatgctggtcaacctctggggcccaaagaagaccatcagcttcctggactgctctgtccagatcttcatcttcctgtccctggggacaactgagtgcatcctcttgacagtgatggcttttgatcgctacgtggctgtctgccagcccctccactatgccaccatcatccacccccgcctgtgctggcagctggcatctgtggcctgggtcattgggctagtggagtcagtggtccagacaccatccaccctgcacctgcccttctgccccgatcggcaggtggatgattttgtctgtgaggtcccagctctaattcgactctcctgtgaagacacctcctacaatgagatccaggtggctgttgccagtgtcttcatcttggttgtgcctctcagcctcatccttgtctcttacggagccattacctgggcagtgctgaggattaactctgcaaaagggcggaggaaagcttttgggacctgctcctcccatctcactgtggtcaccctcttctacagctcagtcattgctgtctacctccagcccaaaaatccctatgcccaagagaggggcaagttctttggtctcttctatgcagtgggcactccttcacttaaccctctcatatacaccctgaggaacaaggaggtaaccagggcattcaggagattgctggggaaggaaatggggctcacacaaagctgagggagagctgcttaatgtgctttaaaagagaggagattctatgtgcttttatcagaaagtttgagttccctgcccctctgccttcttcacacccattacattgtgggaatggatgaaagccacatgtctgtgtgtgtgcatgtatgtgtgcaagagacagcgactgaaatgtagtaaagggaggtatctttatgcgaaaaattataggcatcaagtatattttatatttttttctactttaagtcttcgcctccatagtcatgttcctacctttatcacttccatttttaattcccctcccttgccatatccccactattccttcacctccaattctaattcctaccatatcttctttgcttctccctcatgtttttcccacttcactatatgtctgttttgtattctcattctattttattcctcaaataacagcaaaagagaaggggaagctgaagcccagctaagttcggaaactcacccaagaacacacagtgtccacagcatcagaactaaaatccaggccccataattttcagtcaggcaactctcaaatacacactgttgctttcacaccataatcaaatatcccagtatttcaggcttgagccttacaaaggaaacttagcttcttcagtcctatttcttctcttacaatgcccacaaatcgcaggtaaaggagcagccaaaaagacacaaaaatatcttcatgtttaggctggcacattgtggaccttggtgtcatctaccggccaaatatggtattgcatgtgacatcccagacttctgctccagggtcatccgaactgtactttgctcaaagacatagatatggttatgatactataagcatttatgtaattgttatgttaacccaagtaacacttaaagtacagatgctccttgacttataatgatgttacctcccaaaaaacctatcatatactgaaaatattgtaagttgaatatgcatttcatacacctaacctaccaaacatcatagcttagcctagcctaccttaaacatactcagaacacttacattagcctacagttcagcaaaatcctcaatacaaagtctattttataataaagttttgaatatctcatgtaatttactgaatactgtactaaaagtgaaaaaacagaatggttatattggtactcaaagtacggtttctactgaatgtatctcttttgcattattataaagtcaaaaaatggtcaaagtcaggaaccccctgcaatttacacatattgacttatttaacccttataacaacactatgaagcagataatattattatcctttttcagaggtaaaaactaaaacacagaatttatgttaccacttgcaaatgtgcaagacaggatttgaacccaggaaaactggctccagactccttgctcttaaccttgccttttggtaaaaataatgcctcccaggcccaggtgaaaagcttcaacttctcaacaagctttgaggaaatcatttcaatctaaaactatatctaaatgatcccccagccgaaggggtttcacttccttaaaataagagtttttcaaatacttcaaagcataagaaacaacagaacaataaaacttttggaaaaagttgtgttacagttcattgtgtgtgtgtttctggcttagttcacccactagatttcaggctctcagaaggcaaggaccagaattttgcataaaattggcacccagttttataaatgtataagtgaatgaatgaatgaatgaatgaatcttactctccaaagagaatatataaaaggttctggggttccaatcccacatacgctgtctcccagcttttccctggcaagggcagcaataccaaattcccttttgagtacacgccgataaaataagaaaaaggaaaatcttagttttatttctagttccaacataaaatgattttgattcaacatttatcctggcatcagcacagaacagcaacattaattctattataatcctaatctttatcctagccatccttgtgttaatcttattgtctccttgacctcgttattagagcatattctaatcttaatgtagagcccccattttatatttaataatcctaatcagtcaggcgcagtggctcacacctataatcccagcactttaggaggccaaggcgggcggatcacgaggtcaggagttcgagaccagcctgaccaacatggtgaaaccctgtctctactaaaaatacaaaaaaaaaactagcctggcgtggtggcgtgctcctgtaatcccagctacttaggaggctaaggcaggagaacctgggaggcggaggttgcagtgagccgagatcatgccactgcactccagccagggcgacacagtgagactctatctcaaataatcataatcataatcataatctcagccctacaggtaaggctaagcttaattccacttttcaaatcactgtagtaagacctttttttcatgaccccctctatctgctttctcttactggcacctagaaatgtctacacttttctcctgtttatcatctccctacagccagaggctataatgtttgtatacagtaaaatcgtttctagactgactctaggggaaatgcaacagagaattaaataaagcagtctaaaagaatctgctttgttgaataaatggtttaacataggacttaggactaacatctcttatcctaaattcattgtttccatgtgacagtcatctattggatactctgtgagaaaatccaatataaagttactcagtcacaacccccacaatgtccagtgaaaatagggatggtcaggcacatagtgccagcatacatgacagttacacaactgaattggagcaaataagagtctacaggaatacagaattaaagaataatgtgtgtgagtgcttggagcggcagtgatcatggaagcctcttagaggtttgaaccacagaagagtaaacaaaataagaagtatttgctgactgtgtagaaatgagatgatgcaaagaccccctttttaggggcttggggactcctaagcatggaaataaagcaaaatcctgtgtttcttcaaggaaaattccaggcacctagctggctctgagaaataagtagcaacttgaaaagcaacaaggtaatagcagcctaagacaatagccaaggaagttaagcgttctgaataggtttgctttcctcatagaaactaaagataacctcttaacatatgtctctgcgttgtctctcagaaactcggaaccccaccaaatgaatctgctggcatagacctcagaggacaggaaaatgactgaactttataaccatcatcctttgttctaagtttcttcctgaggagcttggagaaagtaacaccttctaggcagttaacatttttctactggaccccaaatttttaaacaaaggttctcttccttaactaattgcaaatttggggtttttttgtttttgtttgagacaggcttttgctctgttacttaggccagaatgcagttgcagtcgtagctcactgcagcttaaccacccaggctcaagcaattctcctgcctcagcctctaattaaaaaaaattttgtgtgtgtagatacagagtcttgttatgtttcgcaggctggtctcaaactcttggccttaagggatcctctctccttggcctcccaaagtgctgggattacaagcatgacccacacctggccagaaaaatctttgaatctacctataacctgtaagtccctgattcaagatatcccacccttttagatcaaaaccaatgtggaggccgggcacggtggctcacggctgtaatcccagccctttgggaagcaatgtgggcggatcatgaggtcagatcaagaccatcctggctaacacggtgaaaccccatctctacaaaaaatacaaaaaaaaaaattagccaggcgtggtggtgggtgcctatagtcctagctactcgggaggctgaggcaggagaatggcatgatcctgggaggcagagcttgcagtgagccaagatcacacagctgcactccagcctgggcaaccgagcaagactccatctcaaaaaaaaatgtggaacctctatgcactgatttccaatgttccttgtagcttctgcttttctgaaatttacccctgcctttttttgtttcctgttttttgagacagggtcttgccgtgttgtccaggctggagtgcagtggcataatcatggctcagtgcagcctcaacctcctggattcaagggatcctctcacctcagccttctgagtggctgggagtacaggcatatgccaccatatttggctaatttttttatttcttgtagagttggggtctcactttgttgcccaggctgttcttgaactcctaggttcaagtgatcttcctgcctcagcctctcaaagtgctgggattacaggtgtgagccactgcacactgccttacccctgcctttaaaaacccatgttacaatagttagtcagacacgagcagggcaggaaagggcctccttccccaccaggaatgtcaggcaaccatcaggtgataggcggttgttaagctgtctctctaaaataatcattggtcacagcctgtgccagggaaaaacagtctcccaataaatagaaaaacctgaaactaagatctcaggagttgggcaagtgggctcatgcatgggcactaagggagaaatgacagcatttaactggtttataaccttataggaacactccctggtaagggaagaatgcctcaagtcagcatgcatactactccagtaaacataccgtgcatgcagcccctcccaagcactagcaggccactgtacatgcagacagcccaccccaagggaagattcaggggagaagggaccctggaaccctgccaacatataaaaccctaagtcaaggtcaaaaccacgcacttgatctctcaagttgcctgcttggcccccttccaagttggctttactttattttgttcctgctgtaaagctttttaataaacttttactcctgttctaaaatttgcttcggtctcttactctgctttatgcccctcagtcagattctttcttctgaggaggcaaaaattgaggttgctgcagacctgtacagattcgcagctgctaacatattttcatgccatgtaactctgatacattctgccgctaatacccttgcctgcaagacatcagggaggccaggacttgagtgtttagctgcctggtcctccctgcgtagtgtcctgcaacaaatgcctttctttctattggtgcaatccttggtgtaagtatctggttttattgcaccaggcaagcagaccccagtttggttctataacagaaaaggctaaagacaaaaataagcatgttgtgcattaagatagggagatgtgggggaaggagttacaccgaggagcaaaatgattaagcaggaaggtagagattatttcagaaagatacagaagctactgaattgaatacaaccagaaaaaaaaaaaaaaaaaaggatcccttacagatgtttcaaacctacatgatttaggtctcctgagggcaggcacttaactattcattctaacatgacatgtgagttggaagccttaaaggaacattattcaagaacctcgtctctactaaaaatatgaagtctctaataaaaattaaaaagtctctactaaaaatacaaataataataataataataatagccagggctggtggcaggtgcctgtaaaccccttgcttgggaagctgaggtaggagaaccacttgaacccaggaggcggaggtttcggtgaaccgagatcacgccactgcattccagcctgggagttagagtgagactccatctcaaaaaaataataataaaataaaataaacctcaaacgtctgaagggctcaccgaatcatgaatagatgcttatgtgtagggcccagccctgtcttatccttctatctcccagggaaggggaaaccttctggctcctcctatgcagaattaatcgctcacccttgaagggtaccagtatatgccacctcaaactatctttagcatgtggattattttgagctaacaattgaaaatcatcagactagtgaatgctgtaaaacaggatacaagttttccttttgtaaataaattcacatctgtaaaggtacaactcttactaatggagaagacatcagtttaaatctacataacaaaccttttctatctgtaaaggtacaactctactaatggagaagacagtttaaatccacataacaaaccttactaaaccactttgttccatattttcctggtcactttcccataacttgcctgcccatctaccactcacccagaagccccaaactccttttcctttacctagccaagatgttatacagttgctaagaacaacacgatttgaactccatggattcactcacacatgatttttttcagtaagtatattgaaaatttttggagatttgtgacaatttgaaaaaactcacaaaccacatagcttagaagcactggaaaaattaatgggccaggtgctgtggcacatgcctgtaatctcagaactttgggaggccaagatggatgcattgcttgagctcaggagttggagaccagcctgggtaacatggggaaaccccatctctgcaaaaaaaaaaaaaattaactgggcatggtggcacgcacctgtagtcccagttactagggaggctgaggtgggaggatctcttgagcccaggtggttgaggctgcagtgagctgtgattgcaccacctcactccagcctcaattaaaaaaataaatagggctgggcacggtggctcacgcctgtaatcccagcactttgggaggccgaggcaggtgaatcacgaggtcaggcaatcgagaccatcctggctaacacggtgaaaccccgtctctacttaaaaaatacaaaaaattagccaggcgtggtggcacacacctgtgatctcagctacttgggaggctgaggcaggagaaacgcttaaactcaggaggcggaggttgcagtgagccgagatggtgccactgcactccaacctgggcgacaaagactccatctcaaataaataaataaataaataagagaaaagtatgtcatgtgtaaaccaaaaataaaattctaagccccctaactgacaggaagaaaggtaagacatgccaatgataccctccttcctctggagtttagggacaactgaccagcattaacattacaatagagatcataagactgacaaaagattctctgtagcaataaaatagtcaactccaacctgactctgatacagcatcacaccacagatagcaggccctgaaggaaatcaaagtattttaccccaaaatatacttatttgacattttgaaatgactctgcaaagccatttcttgtcatggggatttgcattttgtagagaatccccttccccttccaggtctttttctgatccaggagggattttactaatgagtctgacatcttttaaggtgcgataagaaacatttaccatctattctttctgaggcctggaagcttcatctacgtaacaagaatctttgcttccacaaacatctcccccaacgccacctccacgcccccttaactcaagcatttctttctgctgacttcaactctttaggcagggcttaactttttcaaccaattggcaatcagaaaatctgaatccccctatgacctgtgagctcccttgcttcgagatgtcccgcctttctgagctgaaccaatatataccttacatgtattgatttatgtctttgtcagcaacttctggctccctaaaatgtatgaaaccaagctgtaacccaaccaccttgggcacatgttctcaggaactcctcagaatggctcagaataaacctcttcaaatattttacaaattttacttttttcatcaacaaataaatgtataaaatatatgtagatactaccaaaaaatatacacaaatctactataaaaaccaaaaatttggccaggcacttagggaggctaggtgggcagattgcttgaatccaggagttcatgaccaatccgagcaatatggtaaaaccccatctctactaaaaatacaaaaaatttgtccggcatggtggcatgtatctgcagtcccagctacccaggaggctgaggtaggaggatcacctgagcctaggaggttgaggctgaagtgagccaagatcacgccactgcactccagcctgggcaacagagtgagaccatgtctcaaaaaataaataaaatttatcaaaacttacgcacacacttacagaccatacataagccactcaaagtcaagagaaagcttaacaaaagatgcagaattaaatcataacggcataaaattaactgtagtgtatactgttctactgtaatttgatagccacctcctcttactattgcaaagagctcaactgttgcaagtatctgcctaaaatgccaagtgacactaatcatctctgcatgagcagttcatctatccagtaaattgtgtatagcagtaaagagtggtctctcaagattcttgcatatatttcatcatgtctagagcaatactgtgaaccttaaataacaccatagggcccatatgaagtgccaacagtgatgctggaagttctcccaagaagcaaagtcatgactctataaaaagttgaattgcttgatatacaccatagatcaaggtctgttgctggggttgctgccatttcagacagacgattcatcatgtaaatgatgtaaacttaaggcatcaataaatacagtatagtaccctatatgtattttccttacaattttcttgataacatttccttttctctagcttactttattataagaatacatatataagatgtatagcatacaaaatatgtgttgatcaactgtttacactactagtaaggctttcagtcaacagtaagctattagtagctaagtttggagagagtcaacagttatgtgcagattttcgtttgtgtgtggggtcagtaaccctaaaccccaagttgttcaaggggcaactatatgagctccaaattcttttttttttttttttgagtcagagtctcgctctgtcaaccaggatggagtgcaatggcgcgatctctgctcactgcaacctccgcctcccaggttcaagcaattctcctgccttaccctaccgagtagctggaattacaggtgcctgccaccacacccggctaatttttgtatttttagtagagacagggtttcaccatgttgcccaggctggtgtcaaactcttgacctgaagtgatcccccagcttcagcctcccaaagtgctggcattacaggcatgagccaccacacccagccatgagcccaaattctaactgcccctttgcattgttcaccactgggtactcccatgtgtacatgcatgaagcaaatgttaataaacttctatttgtttttctctcattaatctgtcttatgccactctaatttacacagccacggctggagaacctaagacaggaagaggaaaaggattttctttcctacactccctacacacacctggggaatgcactctgcaggccacatgacgttgcttctgcatctgtctccctagctttgctgcatcagtcccagtgtccagcccacacaggcctcagtacgtgtccctatcacagctgctgctggtgctgaactcaccttccaggagagtctccagcatatccttccacactccagggagccatgtaagtggatgccatactggttaaatattttgagtagcatcccatttgagggaagctgtcacttaacatgaacccaccataaggtggctaatgaatagcacctttctgcctgccttcaagtgacagcctcccttaacatgaagcctaccttttggtaagcttcatgtcaagtgatagcttccctcaagggcaaagtcacagaattatctgtttcaaaagcctgagtggataaacaaactgttgcctatccagggtgtcctaaaactaccaaggactgtgggaggagcaattggcaggaccatcttcaacacttcccattttctgctggggtgagatcacagctggcccccaagcatccagaggaatccagggcctggtaagaggctgtatgacagcaaatatacaaggctagggtgctcagctcagagggcggacaaagaacatgttaaagtgaagtgaacactggctttgcagcaggcagaccagatgcagcagactgcttttaccaaagcagcctgcaacacacatttgtcccattccacatgttctctttacagtgtgacttacgctcatcccaccaacaggtgaagtgtttcctctcctgaacctaggcatggccttgtgactgcttggaccagtggaatatctcagaagtgatgctacgtgactttcaaggctttgtcagggaaaaaaaaaatacagcttaaacctggctgactctctacaactgcctccacttgcctttggaactgtcattaggtcatgaggaataccaggccacatggaaaggtcatgtgtaggggtctcagctgacagccaatacctcctttagatgctgagtgaaggatcttttggacaacaaccctcagacttcagatcttccagatgctgtggagcagggtgaaccctccccactgtaccctatctgaatttctagcccacaaaaaccatgatggataataaatgattattgttgtctgaagccatttagggtaacaggttttgtggcaatagataataatatatgcagtttgaatactggctttgctccttagttttgtgaccccagaaaatgaacacacagtccccttgcttttagatttgtccttcacaccagagctaatggctgtgagatgcccaacactcctggttgctctcttaagtgatctcgtttgtttttctgcttactggtcatcttcccacgtcgagaaggtacaacgcttgaaagccatcttactcaccattttgcctcagtgccaaaaaaagcacctgccacagcaactcaccatcaacacttgttgaagatcacctaactaatgtagcagccaagtgcacacaaagtgctctctactggtagacaaccaacaggagggcagggaggcaacaggctaagtcagggaaaagcaggggacatggaagcctgcaggcagtctacattctaggacattccagagttagaaagtgatctgaaccctacccaaaggcaggtctgaaaggcaaagcctgcctcacagtgcacagggagcaagtcctcccagaactgccaagcggtagcctctccacctggcaacacatctcctttgcaccccttggggtacaattatatattaattatatatcattgtgtgtgtgtatatgtatatatgtgtgtgtgtatgtgtgtgtatatctcattgtaattatatataatgtactaataattagtattagtgctaatcaatagcaccattcaccctgaaaagacactttcagaaatgaatacatgaagtctcattgtagataagcattgacagatgaacatttgcaactgatcttaatcatcaggaacattaactgtgaactcaaataagtagttatctcaaaattgtttttcttattagtaggaggcctgtatgaaaaatagtgctcagtcatgttttaaatttggccagtaaaaatcttacaagttctcttctaagtacctttttaatattctcaatctcactccttcccacccctttgcactgggcactctgctagccgcaccgtttggctctcgactcctgcactcctgctagcagagtgtctggcttacctttggccacagtagaacttttcaccctttgtttataatttacagcccacttaagtgcaatgcaagtttgagatgataatttgggtcttttaggttctacccagggctgttctatagctcctgctactgttgtttcttttttttttttctttttttttttttttgagacagtctcactctgtcgcccaggctggagtgcagtggcacaaactcactgcaaccttcatctcctgggttcaagcaattatctgcctcagcctcccgagtagctgagattacaggcacccaccatcacgcccagctaatttttgtatttttagtagagacagggtttcgccatcttggccaggctggtcttgaactcctgacctcgtgatccacccacctcagcctcccaaagtgctgggattacaggcgtgagccaccacacccagcctcctgctgctgttctgatgccaactattcattttccaaactgcaggcttatctactccatagacttcttctcttttcctagcggatatttcactgtgggaagaagagagactcaaattaagtccaactggtccaaggtggataatcacagtggaaagtttttcaagtactggtctaagattcaaccagcccatgctttagtggaagttcagaaattggctcttaacaggtcagtgaatgacagggcccatccaacccttgcagctgtcttacaaaaatctgagaatcactttaaaaatcagtgccaaaataaaagaaaatttgagcttcaaaaaagcactctccaagatgacacaaaaaatgtttaaagtctcaggcaaatgtttttgcccttgtccattcaagattttttttcagtttgatagcaaattatttccaagatgctcagagttcctaaacaaagatgtttaaggttggaagcactcagcagccatctcatccattaccttctagcagtcatcattcttttactcttcttagttcctgggaaggagcgtccctagaggggatgcttaggcacttgctccaggctcccaatacatgcccactactgtcaaggaactcattaaacagcagggacagaggctaacattcacgcaacatataccatggcccaagggccaacctaggcacctgaatgcacaatttataatagtctttgtacccaacctatggaggaatgtattactgttattctcattttcataaatgaggacatggggaatagagactaagaaaatgtttgcatgtggttggatctgataccctggcagtctgactccagagcccacacttttaaccagtagtgtcctcactcactaatctcagacttaatcatgtcctgcttcattctgctaagccctcaatggatcaataaaacacctcttttcaccctccgctttaatgccttttcatgaacttggagtcctctgagcctcccttcttggattgaagcccattctgttcacaggaagactgcaaggtgccgagtcacactgttcactggtttattgagattcggggagatccttccccaagagacaccacagtgtgaaagggacaccacctcccaccccataggtccatctgtctatcccaacagtcaagggtgccttcctttggtcaggattctcatcaactatccactggaagcagctctccaaacctgcccccacttatttttccttaattcccctcaaaaaaacacaaaacaaaagggagcagtcttgggagaagatgattgtgagtgtagactgagggtagtacatgaatgcaatggagatggggggaatctgagcagaaatggagattctgtgacaaggagagggtgtggatggccccaccaaacatgaattggggaaaagtgcataacaatgtgcagggtagggtacatatggctctgtcagaagaataccatgatttaagggaagaaagtacacaaggtacatggagggtacacagggaaagtacatggataaacatggacgtgtgcaaataggaaagacatgactcagcatgctagacaaattgcacatgcctacccaaacacgctcaagggcagacccatgaccatgagaggggcacacgtagctgtgaatgcagggcacccgagagcacatgtgactgaacatgaagaaagcatacgggaaaagcgtgtgtacacatgagcatgttcagtgggcacacgcaggagaggggaggatgcatgtgtgctgagcgtgagtgcacagagcagaggcaaggagcatgtgagccttggcgaaaagaatgagctcccaaaggaagcaaaattcagggggagccacatgtgagaaagtatagaagggcaagtaagatggaaagagattatgacagtggagaaaaggagaggcccctttggggtggaaagagcacttgttgggagacccctgctggacaggaacagagcacaaaggcagaggagctgcaggggttgccgtggtaactagaagagggtgttgcatgggaagagaaagatgcagtgaggctgctgaggaggcagcgtgtgagcagtgagcagcttcaagccaggtacgaactaaattgtgaagaggtgatacaaaattacatgaagcagtaagagagaaaaaggtctgtttcccagaggtatgagagacccaaatcagcccagaactcacagggggacatgtatttacaagagatgagattggatagcatgttcttcccagctggggatggggaccccctgcttcctgagtcccctgcccttcccctctccctttccctccccctactggcctgtcctccctcaccctaccctcacttataaagcaaatgcactcgactcccatcacagctaagccggtcggggggctcagggggtcccctgggcaggcccccagagggttctgggggtgtcggtgggtggcgccgggagcggagctgctgccgagactggagttgatggcgcagttcagagacacgctcctctttctggaggaagaagcacaattgggatagtaggagaagaggaggtgatgaaggagtggggaggagggaaagagaggaagggcacagggaaagagaggaagggcacagaaaaatgtagggggaggacgtagggtaagtggacagaataaattaaaaggagaaatcaaaacagaacaagaaaagccagagaacataaggataccgatagaaaaaatgcgatcagggaaataagagagaatttaaaaacaaaaggaaaaagtggggaaggagagaaaagtcagtgcacagagcttccaataaatcagagagatgtgtcaacccagttggaacatccctctctttggcattgcaccagcccctaatgacagcctggggcacagtgaacgcctgcccaggtcctttatgctggggctgcatgctacacccagctgctgtgagtgttgactactagaggctcacagctgcctctctccagttgtcacctacagccaacagccatcctcttgccttaaggaggctgagtcaaccacatagctcccactccagagcccttccacctgccaggccaacactggattttgcctgagatagaatcttgctcagccctttcccctcccctatgctgctccattcactccttacaggttgtctcctaggaccctccctccatgagccaagaacatctgaccctgtatctcaggcttggcttcagacaacccaagctaagacgcaagcctcctggaccactccaacaccctaccctgacacccacccccgcacctcagcaatgatcttttccagttcacggttctccttctccaacagccgggacttctcctcctcgttgttgttggtcgatgaccctgtcttcatggtgtcctgcgcctccgactgccattcccctcgggtgatcagcctgcgcatctgggggcaaatgtttgggcgtggggtggcccagcaaggactgtactagtgactggctgatggaaggttggaggtggaaggaatgctgataagagttgggcccaaaacaaggggaggagtgagaggagggtgaacggaagggcagaggaactcagtaatataggaaggagggatggagggaacatgggaacaaagagggtgggagaaaagccagatccttaccttgggcacaaagagcacaacaagagtgatataggaggagaaaactatggcaagagaggcaaaggcaaaggctgcatcctgctggctggacagaatcatggtgacaggagcagtgatgaggcacaggacctagagggaaagacacattgagggagtctcaggtctgcaggctcagacaagatccagagtttacttcccatgggagggagtctatgcagacagtttcctggtgaactttccctttgaaaaggatccaaattcaggatcatcctcaaatatagattgagaaaaatctcaaactgtcccaaaccagttttcactcttggttaacccctcccctcaaggcaggaactcccaggatctctatgcacagattccgggtcctccagagtcggtccctggcaggaaatgtcaatagagtccagcccattaaccacagacaagcaatttaacgtctctgtgtttctgtttcctcacctataaagtggggatactaatatctacttcactgggtagttgcaagattaatgatacaatgtctgtagtgagctttgtaaactgtaaagtgctttatagacctgaagaattaacaaactttttaagacttctaagcaaccgatcccagatctagcattgattcttcctagtcctctatatctgggctgctgtggtcagcctacagggtcaatgccatggggtcagtgctcactgccacattgtagatagccatgcccacagcccggtgatcattgatcttctcagtggacacactcttggtctcataagcaaggaagattcccagcagcagcagcagccccttgtaaccatagaaaatgcctaggatggcaggagagagtcacttgagcaacaaggaccacaatgctcctcactcaatccccatcccctctctgcccttcacctactctgaaatggaaagggggccctcctctccaatccaacccctctgacctagcaaacctcaccctgtgtcccctatcccttatgtccacccaacttgcccagaccacatcactttttcctgggattcacacaggaaagcaatggtggcaagctgctgtcagtcaggcaagggcttgttgaatatctagaaataggccagtctgggccacacatgcctcacccttaccctacaggtgggaaggtggctttccaggcagagggtaggtttgcaatttgtgaccatgaatcgaacaatgctaataaggccaagggggatctaaaagataatgtcaagtctggaggtggggttacccccacttgttcctctgctgaacacaagttcttcatctgtgctttctgtgctttgggccctaagctcctcatagcaaaagagcaactctcccctattctcagaaaagattagtgcaataacaaagagtagggtgttcaaactgggttgacaagctctctacctcctcttccaaagacccctctccctccaagccctctacccctgccttccctcctgcctttgtgcatccctgccctcctttgcccacatcccacacaccaagccatgtattcatcttcctggagctgcaatgctccagctggggcagaatagagacgtcaatatcttccttaggttcctccttggcaaatgtctagggcagaaacaaggtcacaagaaagatggttgccagcctcccctcctctcctcaacgcttctcagtctctggcttccaactgttttcctatgagaccctcaatgctgatgccaaatctcattctaggcctaagaatgttttcctgaacccttggaggtgcttgttccccactttccctgatgcctggaagttctacacacccttcccagattcccaccccttcctttcttcagctgaatctggaggcctatgaggggctccttctaggaaggaaaggaagagcttccaatacgaggaaggcactctctccaagtagcttcatccctcaagacacacacagccccagggccctgatggccactgagccctgctcattctcctgaccatagcacctcctctccagtggtacctcaatggtccggtgcagagggtccacgatctgccagatggcgagagtgaggacatccatgcccaccagcaggcccactgtggcatacagcttccagggttccagagtctggataaatatgtggggagaacaggcacgtcaggggaaaatgctctgtgccccaggagccaaggatctgggggctgaggattgggcagcagctcaccttcctccactccttcttttcttccttctttgtgaagaccgtgtggacccaccaaatcttggtgaacatggaaccgtagcccagactaaagcccaggcccaggagccagaggcgggcctagaaaggaagagagggcacaggcagaacagggtagagtagtagccgggactgcagtaaggatgggcagaaccctaagggagagtgggcagggagcacgggcagggagctcatggtggcacagggaggatgcgaaaatgtgagcaggacggggagcggcaggaggagagcagtctccccaccttgaacaattcctcccatccaccctctacttccacaccaccagggtgatcttgctaaaacctcctggctttagtggccaaaaacctccaaccactccccaatatctataagttatagcctgaacacttctggatatgacacagacccttcacaacatgctcccatccacctgtccagctaggctcatctcccagccccacacctaccccacgctccagccatgctgaactactcactttctcttcatctactctctttcatgtattttctagccacacgatgctccctatgcccctgaagtagccttcctctatttctctagctgataaaatcctatttgtccttcagtattcaaatgccacctcttcagtgaggtccacccaatcacgccagcagtgaactgtgttcccttctttgcccccaaagcactttgtgcagatccctactctggaacctctcctattgcactacagctaattgtctgcttctccagctgcactctggcctcactgggaacagaggattcctgatgaactgcatgtgcatgtgcatggaaatgccatgtgcacagatgtatgatcaggacagcacagagcagaggaaaaagagagagcaaggacaggcaggcagatcaggagaaagagtgggtgtttccaccagtggaaaagagaaccactcaactatcactgttgaagctggcctctccccacagcactagaaccttccatgtaccaacagtcccagagcccctcctccctgtgtggcagtggtcccttccccccaactctctgctgtgtttccatctctgcttctatccttccaaacccaacaaaggctcccaaaaaaagtccacagttctgattctcagcccccataccacagacaagccaccattgttcaggagacctttgagcagatccccttcctttgccttcaatggctccctcctcttctctgcaaggcctgccatggcaaccttggaactgacaagtaaactacagaatgaaaatggcctgcagacacagaaagaagggacagagccaaacagagaacagaggggtgatgctagaaggaaagaacagggacaagagtcagggaaagctgaggaggaagggcagagaatcataaatcatggaaggtgctcctgagacgggtgggagagtcacatcctgtaaggaatttgcccaccacctcctcacctggcagacgaaaggaaactggttcctcccaatgtggtaaccatcgagccccagggggaagacagcagctaaagccagtgagcagcccacagcagtcaggttgttcaggttgggctgtgagttctggatataactagggcagaggtggagagggtgagagggagagagaattacccctcttctccagggaggctgagctctccaaataccacgcaatggcatgaccctaatttcagggccaggggctaaaggaagacaggattggagaagacagtggagccttgagaggcagagcaatgcagtcatggggctgaagatggagttgcagagggcttcccaagcacaggcccccactagaatacaggctatttatgtagagtccaagactgtgagacctggccccaaaggttgtttttttctcttcttttcttttttcctcccgttagctactttggagtaggagtgggggttatatctggtttccctgttttcattctcaacaagtcagaatgaaaaactccatgatacatggccatgggagttacacaggttttattctcatcctgtccaggaacatgatcagtatctcagagaggcagacaaggaaaacgtcagaagagaaacttaccggacatgtgagttgtagatgttaaaggacagacagacaacagctaggacaatgcccaggctggagagaactgagacggagataaagagtttctgtgacaggaagcggaatgtcttgatgaccagggtctggtcagctgggggggaccctcctgcatggcacaggggaggaagaggggaagggaaaagagaagggaaggaggacaaaggaatgaagacgggataggagaaaagggcaaagaactagattgctgatggacattcagtcattggctggggacatgaggccctaactgcactggacagaggttactgcaggcagaatgctcagtgccactggggccgttaggaagcaaccagaaatgagatgagaagatggagtgaatggtctatccataggttgggaaatgctgaggcatgtccccaaagttgtagtctttgtttttgtttgttctttaagtttttctgtctttcttacagcaaaggaaaatgggaggagaaagaaggggatcattaaaaaatgttataaggtttcttataacccaaatcaaagttttaaatgacaattatggaatcataaagctaaaaaggccttgaagtatctagtgtggacacctattcttaagacaaacaaaaaaagaaggaaagctaatctgaaattttaatcctggcagggtaatattcccaaatatgttttccagttattattagggggaagttcaaatttgtcagagttcaccaaaaaaaactaatttcaatttgcttagttttttttttaaagaataatttaggccatgcagcatttatagcaatccagaacattgtcctaaattcgaattgtaaaaaaaaaaaaaaaagggcaaaactccagcagtgctgggaatgactggatatctgctgggcagggcagacggcagccatcttcaatggttgagcctccccttcattctcaaggaggctttcttttatcagtaggtccttccttttgtccaccttcagtttctctcctatgtcctatcatttagaccaagtacacaaagaataactgcttgctttctctctttaaaaagtatattttgagggatgtaatactacctattaggtacaaggtgcactgttcgggtgacaggcacactaaacgcccggacttcaccactatgcaatatattcatgtaacacaactgcacgtctacctctaaattacataaaaataggaaaatttttaaaaatacatataaaaataaaaagcacattttggcagatgacaattacatgaggttttccctcctcctccatagtttaagcaaccgttttcctgacagagacagacaaagagacagctctgggcttgaagtagctggttcaaatatatcaagacaccaggacatctgggaaacccaaatggagtttccatttcccgccctctgcccaccccctgcctctaatccccagttaccccagcaatgcaccattaaaaatagtactaaccaccgcctattccctctccaaatacaccagtctcccctacccacgccttaggggttgtattcactctcacttaaccctttctcctggcccagctgccagccacattccaacctaacagtctctaccattccatcctcactcaaaggcatgactttttcccttgactgtcgagaggggctgaaggaaaatacaaacaagatccactcaccaatccatttatctgttttggaccaggaaagatcatccttggtgctgtcatagtagccaatcttcttgtagctgccacctgggcagacgacaataaaaggagtgaccacaggtagccaaagagctgatcctaggcattttcaacttcccacttccctagagctttgcatggttgtatctgattttattttcacctgaggccctaaggatgcttggaaggacctacgagactcttgaatcagcaacatgacttaaaagcaatataaggtggttcccaagacaactcaaataaataagaatatctatgtttaaaagtcttcagtgaggaggctccacaacatgtctgccacctattccattcctcacacctctctcggcgagatgtctctcactttgattttggcttctaaagctttacacatatttctgcttattcttcctctcatgatgggcaggctctattttcccagtggctttcattttaattttagaacattctcttctgttggcttgggttttaattccttggataagttatatctgcctcttaaagcgccattgagtaaaatttggtcatttctaagatttctgttctagaactgtttccgttaccataacttttccttcaaaagccaactcacactcctttcaccatggctgaagtccatttcctcttgtcctggatacaaagaggagctgaaaggatgtggaggtggggagaaaggaagaaagaaacttttcacaggaggccaagaaatagctctcttggccatgccgtaaaagactgagagccgagtggagcagaaaaattaactcctagaagttctgcaaatacctgtgtgctaagtttcaagaaaatacaatctacaaaagccaagctatacacattgaagctttacacagcaaggaaatttggcagattcccttaaaaaaaaaatagcggttctcctagattcagctttcttgagtctaactgacaggtcatcaacctctcaacccaagccactcaaggggaaattcctgaaattaatggaagccactgggaaagagagtagctgtttttaatttgcatgtctcttttcttttcttttttctttgagacagagtcttactctatcacccaggctggagtgcagtggcgtgatctcagctcactgcaacctctgcctcctgggttcaagtgattctcctgcctcagcctcccaagtagctgggactacaggcacctgccaccacacccagctaatttttttttttttttttgtatttttggtagagacaggtttcaccatgttggtctggctggtctcaaactcctgaccatgatcatgatctgcctgccttggcctcccaaaagtgctgggattacaggggtgagccaccacacccagcctgcacacctcttttcaagagcaaaaccagtgcaactcaaagacatcaatcttcttgtagttaagcttattattattattatttacaagcttgatgaacagagttaaaagagaagggcagaagttgggaggtgccagggcaatcttgtgatgtctctggcattcttccccagggggcatcccagcccagccccagcctagcccccatgtccggtcccctcctgcccctgtactaaccctgaagctgctcgataagcgtccatgccatccgagagccgctggcatcaaacaccacatggccctgagggaaggaacatgtggagcaaggcaaaggagacaaaagcaagagtgaaagagaacatcagggactctttaaatccttctgtttttgatgtaattgagcctctgaatgaatgctatttatggcatttgcctgcatataggacataccccagatgcccataccctagattttagaaacattattctttggagaaggagcttcacttatgagatttgaatgggaaaaaatccccagacagaacaccagcaggcttctggttgtgtggcctaagcaagtcagcaaatctctctggaaactaatcttttcattttaaaaggaataagaagatgacctttcagactgttttgtctttcaaaatcctatagttctcatctgactcatgaatacttggtctagtttgaaaagaaatgaggggaggggtttaaaaaaatggaatacatcattttttttcctctagtctttgatgggttcttctaatttgaaggtccctacttctctggtcggagactgattctgcaaagaagtaactgagaaaaacagagaatgcatgtttgtagaaggtgcctcttgggagtctctctcaagattgggaagacaggggagtatgaaggaagttttaactcacagagacaccctcaaaggacgaagagttcattgcccggtagatttggtcggtaatggtctggttgttgtagttgaagtcctccaggcgcacaccagaacggccgcctcctccagatgtcttgttcagggccagtgccaaggcccagatggcatcataggccagcggtgcctcctggaagcctcctgtctcctcagggtgtcttttcagtcgcttggttagtttctccacaaattcctgggatgtcttgggaggaaaaaatcatgaggaaagaactgaaatgtgtgtgggtgtgggggaaggggtgcaatccaattctgactcaatcacttctacttgaatggatggtttgtgttactgttgtcagattggacacatgtacattcaaaatctttaactatacccatgtgtctgccttagatcggaagctactagactagagtaggtattagctgtgtctgatggtgttagtgtgtacagttgctagctcagaactgcaaacagagaattttgacaaacactctggataattagtggcaaaggatggaaggtagagcagagtaaaggaggagacatggatattccaatgaagagctgtgacactgatgttctctgatccttctgactttcttcatagagttaacccaggatctaacagctcctacaattccaaaagattctagaaaaggtgatagcagtcttctcactctgcttgccagccaggaggatatttcttcagcatgctaacttcttgccattcttgtgtgcttttggttcactgcctcttagaaggctttcagaagaatgaaaactacagaaatacccttcacatttttgaagtccattatcaatcctacccacacccctcccaacactcaaccttctttttccatgaaagctaaaaagaatgatagttcctttaactctctcatgaactgggtcaagagacctgacttcatataccttgcagtaaccttgtttggctaaataactgtaagtaaattacttaacctcttggaactgcattctacatactggagaaaatcacatcattccttccttacctcacagaaaccatacaaggaaaagcttagcaactacttcttgggaaaccacaagtaatacacaggggaccatacaaataattgtttgggtttggaatgttttaacacaaacggtaatgaaagaataaatagatgaatgaagaataaataaataactttgttcctcatgccttgctcacttttctctccaactttctagagagatagaggagtgagatacgcaaagggcacaggcaaggtacagcagttgctactacactgggctttgaaggagcctgggctttgaagatgcaatgggcctaggttctacccttgaggacaagaccaaatcccatgccctctcttaatcatcagcatctagcactgtgcccaaccataatgaagtaacaataaatgtccattggattaggccagtgaaaatactctgtaaagtatttaatagtagatacgtctcattatacatttgtccaaacccatagaatatataacaccaagggtgaactctaatgtaaactatggactttgggtgattatgatgtatcaatgtaggttcatcagttgtaacaaatgtaccactctggcggaggatgtcgataatgtagaaggctatgcatgtgggaagcatatgggaagtttctgtaccttcatctcaattctgctgggaaactaaaactgctcaaaaaaaaaaaaaaaaaaaaaaaggccaggcacagtggctcacacctttaatcctagcactttgggaggccaaggtaagcagactgcctgagctcaggagttaaagaccagctgggcaacatggtgaaaccccatctctactaaaatacaaaaaattagctgggcatggtggtgtgcacttgcagtcccaactactcaggaggctgagggctgaggtgagaaaatcacttcaacccaggaggtggaggttacagtgagctgagatgacgccactacactccagcctgggcgacagagcaagactccgtctcaaaaaaaaaaaaaaaaggcattataaaaaacaagtcaggctgggcacagtggctcacacttgtaatcccagctctttgggaggccaaggagggtggatcacctgaggtcaggaattccagacagcctggccaacctggtgaaacccgtctctactaaaaatacaaaaattagctgggtgtgttggtgggctcccgtaatcccagctacttgggaagctgaggtagaagaatcgcttgaactcaagaggcagaggttgcagtgagcagagatcacgccactgcacttcagcctgggcgatggagtgagactctgcctttaaaaaaaaaaaaaaaaaaaggcagccaggcacagggggctcacgcctgtaatcccaacattttcattttcagaggccaacgcaggaggattccttgagcccaggagtttgagacaagactgggcaaaacagagaggacccaactctacaaaatttttttaaaaattagccagacttggcctgggcacggaggctcacatctgtaatctcaggactttgggaggtcaaggcgggcagatcatgaggtcaggagttcaagaccagcctggccaacatggtgaaaccctgtctctatgaaaaatacaaaaattagctgggcacggtggctcacgcctgtaatcccagcactttgggaggctgaggcgggtggatcacctgaggtccggagttcgagaccagcctgagcaacatggagaaaccctgtctctactaaaaatacaaaattagccgggtgtggtggcgcatgcctgtaatcccagctactccggaggctgaggcaggagaatggcttgaacctgggaggcggaggttgctgtgagccaagatcgcgccattgcactcaagcctgggcaataagaatgaaactctgtctcaaaaaaaaaaatacaaaaattagctgggtgtgatggtgggctcccgtaatcccagctactcaggaggctgaggcaggagaatcggagaatcgcttgaacccaggaggcggaggttgcagtgagccaagatcatgccattgcactccagcctgggcaacagagcaagactccatctcagaaaaaaaaaaaattagccggacttggcttggagcagtggctcacgcctgtaatcccagcacttcaggaggctgaggagggtgaatcatgaggttaggtgttcgagaccaacctgaccaacatggtgaaaccccatgtccactaaaaatacaaaaacttatctgggcatggtggcacgcacctgtaatcccagctattcagaaggctgaggcaggagaatcactggaacccaggaggcagaggttgcagtgagccgagatcacaccattgtgctccagcctaggcaacagagcaagactctatctcgagaaaaaaaaaaaaagttagccagacttggtggcatatgtctgtgatcccagcttacttgggaggggctgaggtgggtggatgacttgagcccaggaggtcaaggctgcagcgattgtaccactgcactcctgcctgggcagcagagggatactctacctcaaaaaaaaaaaaaaaaaaaggctgggcgcggtggctcacgcctgtaatcccagcattttgggaggccgaggcgggcggatcacgaggtcaggagatcgagaccatcctggctaacacggtgaaaccccgtctctactaaaaaaaaaaaaaaaaaaaaaaaagtctgttggatagataaatggatgaattcatattctaatcattttacctgctatgaaatctcaaacaagttattaaacctcactagttggttattcagctttaaaatgagaataatactatctaaaatagtatgaaatgaaattagaacatgtataaaaatgctgggtatgaagtaagttacattttctctacgtgaatttccttgactctcaacctcatctttgttattgatactcagatctataatttcagcccaatatttcaagtccatatttcttttctttctttctttctttttttttttttttttttgagatggagtcttgctctgttgccaggctggagtgcagtagtgcgatcttggctcactgcaacctctgcctcctgggttcaagcgattcttgtgtctcagcctcccaagtagctgggattacaggcacacgacaccacacccagctgatttgtgtatttttagcagagacggggtttcaccatgttagccaggctggtcttgaactcctggccttgtgatccacctgcctcagcctcccaaagtgctgggattataggcgtgagccaccgcgcccagcctcaagtccatatttctaactgactctgaggcatttttaatgtatgatgaataatctcaaaatcaaaatatccaagatgaagctcaattttttcttactcccaaacagctcccagtaaatgagactgaagccttggaattacatcagaccctttcaaatcactgagtcctcttaactcttttgttgaaatgtttcattgatatcgatccctccttacacaggatgatgatgataatgataacgatgatggtggctaacatgtatacagtccttaggacgtatcgagcattttcctgaggaaactatattaccttatttaatcctcaaacaatccaatgaggtgttattatccccattttagagataagaaaactgaggcacagaaaagttatataacttgcctataaaaaagttatactattaatgagtagcagagctaatccatactcttaccagccaccctacacagtctctgtacatgagactgcctctctctaagagcacctgcacaaatagcagctaggctaatactttgagtagtcttttggcttcaaattgaaagattggtctatccaatcttcagttcaaggtaaatatggcatcaaaaaaatcacccagaaagaaagggattaatctgctcagcacgatgcggtcccctgctcaggtggtcagaccctgtgctcacgccaggtcactaccactaacacgcctaaccactgggggcaccactgctcctgccaccccaagagtaaagaagagtagaatgcttcccccttgagtcagtaaagatacagttatagattgtcaaagagacactctactctgcagcttaaggaaatctgaacaataaagacccctcaacccacagcaattagttaatcaaccaagtgcaaatttatacctaatttttttaacagccttgtctggctctcaagaatggatgcttgacagtgggctaaaatgtatatcttgaggtagctttttagtttgtactggtcctaggtctgatgggatctctaccccaatcaagatttcctcacaatcttatctccaggatgccacctcccacattcccctctagcccacagctacatttctctaaaaccactctaacccactctccatttccacatattgcccctaaagatgttttctctaaactagggtttctcattctctgcactattaacattttgagcaagataattctttgttgccaggggctgtgctttgtaggatatttagaatcatctttggcttctacacattagatatcaggagcatgtatccctccccatcccctacccccaactgtaacaaccaaaaatgcctccagatagtatagcgtctgagtctagggtagtagttgaaaaccactaccctaactaatagttctcgaggtgtgatccccagaccagtacatctgcatccccagggacttgctagaaatgtcagttctcaggccctagcccagatctactgaatcagaatttccaggggaagggcctgataacctgtgaactaactacctttccaggtggttctgacggatgttaaagtttgagaactattgatctaaacataaggccatccttagggaataaaagcaactctgcttcttttctaagtctccatggctccggccccctaggtccaacccttgctttgatccacttctatttgtgctgtttgattaatctataatctcttttgcccctaacctattgttaagactgctctatcctcttcagaaaacattggcttccccactggcattttaggctggtcccactggaagccctatggcctcaaaagcaggaaccatctttctctagacacaaagtcagaaagggaccttccaagtcttcccaccccaatgctcaggtgtccctctatgtccctaaccatctctctgttctctctctctctctttttgtttagagctgggggtctcactatattgcccaggctggtcttgaactcctgggctccagtgatcctctgccttggcctcccaaggtgctggggactacaggtgtgagccactagatccagccaaatccctgttttctgtcagcctcctctagctccctgctataagacagaagcaacgattggcaagtcctgggctcagggcaccaacaagtctttctggctttggtagccagttccaatactttcccaggttttatggatgactcacctcttgggtactctacaggaaagtgatcttccaaaattttttcattgtatttttcaactaacataccttaaaacatagagtccatttagaatgtcccaaaacagtgtgtatcatcagagtccatgtggcagcagatctttcatcacaacacaccaccagagtcaacttcctaaatcttatttctcctttgctcagcaattgccagtagctaaacagtgttagcagataaaagtacaaactttttagtcaggcttcatggttttccatgggaagtgatgagcagagcagtttggagccagatttaactaggattcaattccagctggactgctgagtagctgcatgacctgagacaagtcattaaaccactctgagtctcattttcctggtctacaaaatgtagataagtccacatcagagttttgctgttagaatccctgaaatcatgaatctaagtaccacacaaatgccactgttagtaaaactttttaaatcaagctattttggggctttacaaccattaactcacccctaacatgctctccaaagcaggtacacacttggtgtaataagcagacacataggtggccgtatcgagcttacccaaaattcctgtactctttacaatgtagtgctgagcaacaaagaagcctcttcccctgtgcccacacccacactcacttctgcccctcagctgcagggctgccccagccctctcaaatcagagaatgcgcctcctcgctccaagtctgtcattaaccagctgtctggggctaaatgatttcaaaagccccttctccacataaaattctaaaaaaagaatcattaaaaaaagcaacaggatccaagctaattgcatatcaatcatgagtgaatattaagcaactctaaaacactaacataaatcaccaagaaaatgaaatgcaattctgcccagacacagtgctcctgtaaaggtgtgcttgagtatacaagcatccatattatcattaatgccggttcctcctgacttctcaccaactgctcctcgtctccatggtaacagcccttccactcatcaggaacctactgaacatacaactccatcgtttttttttttttctctctctacccaaggaagtcagagcaaaggtaggatccacaggaaacataatgcagacaagttcagggtgggcacagccccctcttctcctttatatccaaattccgcaccctctccctgccaccctttcccctgcaaggccccctcagtcctctccaccctcccaggtgccagactgcaagtccccacactctcaccatgttggaaatgctgcgggtattggcaggattcagcatgacaatctcagttgtgatgtggccctccaccgcctcagtcatctcatccactgtgcagttgatagaagggtcgtagatcttgaaccaattgtcagcataccacccaatgaggaaccagacgtacttcttcccaaagagacgctccttgtacacctgaatacagaggagaatggctgagtttttgtttgctcatttgtttgtttttgtcttatctcacttgatactatttagcctcttgggaatcagggaagagcagtagaactaaaaagagaaatctacaagtcttggggatagtaggaaaggctgacaattcttccttctaagtttctccccagcccctgtatttctgagtggccttttccagccagtcaggacagatggaattcatgggcttctcaggaaacacaaagcagtagaaaaatgagatctgaagaaagtatcatgtgtgtgcagacaagggatgcagtcagagccaacagacagagacatcctatgaatcgtcacctcagatcatatgctatcaactcaggcacagatgccaagaggaggccccacaagaaaaccaagggaaactcccacccagtgcccctccctcttcagatccaactccacctcacaaaaaactttccgggcttcagtctcatagaaaagtcccacgatgattcgggcatcctggcgctacaacagagaaagaaacagctcctgagggatgcccgggaatgcctgaggggctaagccagatgtcttcacagctttgatttcccatcccaaagtgcttagtgcagggtaacgctcaacgtatagtgaataaacgtcaactggaagatggagctaaacttccccaggagatgctattgcctcagagaatcaaaacctgcccccgcctggctttcctctccaaccagtcactgtcccccagcttggtccctccgtaaacagagcccaccactcccagccatctgaccttcaggtttttgacgggcacagctggatctgagaagaaactctggcggaaagtaatctcaattccagcctccttcactcgttcctccaggtcgtccagagtcttgggtgggaataaaaaacaagttggaaaaacacggggtgcatgagggaataaagaccagagaggttaactggggatttcagagcaatactcagatagagcaaagaagcagccattctgaaccttccttcaacagcttctgtccctgaagtgaggagttcgggaaggcatctggtcttaggatgtggattccaagtgggaaggtgaatggtgagcccctgctgaggctctgtgtgggggaagccactccattcacccactcctaccactgaaggcaaagatggggtaaagaaacataaaggaaccaggaaaagacaaggcaaggactgggacagacagcatgatgtcaacctcaagaggcaaatgggcagacagacaaaggatcagagaagaatggtctgaatcagagtgaaagtgggggaggattaaagggccactgaacacagtggatagaagacccaaagaatagaataaaagggagggagcagactgccttcttcagatgtagagcctgtatttcctctctacctccccaaatctccctcttccccctcaacctctccttgtctgtcggcttctctctcttagtaccaactaccagatccatgcagctgcctttctgcccctctctctcctctccctcattcctctctctctctctctttcctctccctctctcctctgtaatccactggctccatcccctctgttcccattcacacccacccaccaccccccttgaaagcctctggaatctgctgccttcctggattcctatctcatcttcgctcccatctcttgcccccactttggattgaacctactttaacagaactgagtcattctgggtctatatgtctggggaacagggcatcaaacaggggaaaaaaatcataaaatcataaagacagagaggatcccaaaaactcaactcattctttcccctggctacagaaagaactgcacttaatccacatggaatgcgttctctttcaatgaagaatcaagttcttgcccctaaaagtgactctcacgtcacatctcctggtgctggaatttgagcttatgtccctttaccccttgcccaacccctcctcaccgaagtgaagacctcagtggtctgctggatggtagcaatcttcttccagccccacttttcaaagagtttcacgcgggtagggttgtggagtgtggctgatgggtgcgttcggaagaaagtggggaaacgctgccggtttgacagggctggtgagctggagccataggaaagctgtggggcagggagagtgagtgcaacagggtctgttcactgaggacaccaagagtggccaagagttcctttaaccctcttcctgcctttgggtttctcttccttactctctccaaacctccccacctctggtctgcctaaggaaaagagattctcaaaggcccacacacccctcacaaccgggatgctctttcactgatctaatttcaattccttctgaagaaggaggtcagctgcagcactgtcaggccactgttgctaggaggctgcctagctcaggtctgcagaggactctgaatcttagtagcaggtcctccacactccttttcaatacaaacccacaatcgccatcgtcccttcagtagagctcaaaagggaatgaccccatcttctgacccccatagccctgcttaccacaatgaggttccacatcctagcagcctcagccaccagcgtggagacagagctgcagccaggcataaggatgatcttgatagggtcgttgtagagcagctcatataggtacttggtggcttggcctggatcacactgaaagacaagaggagatgagggcaagctctcctggggcccctcccctgtctgcaattcctgctcttatctttctcgaacaaattagttcctttctcaattactcactttcatcattaattaccgttttcttctcctttctggcatctcttcctgtcaagtgccttttttctcctctttcattaaacttccttctctgtcttccatctggagccttacccatcacctctcctgcacacccctcctttggtattaatgaacataccaccttacctcctttcagctcaccctcagacatcccccttccctctgtcaccaagccctttaccccatgtttctatgcttcaaacaccagtgggtggaagaagtcagtaggaatacggtaaactctttccacatccccagatagcttgctcaaagccatattatgaaaattccttcctcacctctgcaaaccccttctccccaccttccatttgtttcctccctcttctcttttcagagctagtgataagtaaagagagaacaggaacaagaccagtagggggtcccgctcagtgatccatccctcctgctgggcgctgacatttgacaggtccattagaaaaaaagacactggggggtggaagtagggaagaatgtaggatgaggaaagaacagagagaatgaatagaatggaactctcaagaaaccagacaatttgagaggtgccttaaagagaggcttggagctagggaaagtaaacaagcagaaagctggagaagaaaggaagcttgggaggaggggaaatgggggaggaagagccagccttgggtctcccactgcctgttcccctcccactgatatatgacatttcagaagctgctggaaccccaatgcatgtgaagacgaaatggcagccagtggggagccagggcagaggggacacagacagggggctcaggggactaaggagggtgaaatgttgccaggaggggaggataagtagaaaggaaataaagaaagcactctggagcctgcttacctcccactgaggcctgacatttgggacacggtgggaagttggagaagggggagccaggggaagctgttggaatctgaagaaccagcagtcactgagaattctctgttgcccaccctaccctcactctggccaagggcagtgctcaacaacattggaaggttttctctttatgcctcccactagggcaactttgtaaatctttaccattctcaggacccaccttcctgcactctccccacatctattactccagatcctgctcccagcttctcccacagcccctcagtgcccctccacttctctaaagacagggttaataggaacaatgaggacatacaagaacatataagatacatatcaacagggcaaggcatgccccccattttgtttcctgatttcttatctaccttttcttgcaaccgtttccctcttccacacactattcatcactgcagattctctccaccacgtgattctctccccctccccaatagatttccttagttctcctccctctctttgctcttgcaaggatctggatttgcaggcaggaaaccgactcattccaattgacacattctggttcttctgccttcccatcccaccccgcttgatgcctctgatgttctccagttcccttctcccaggtcccacgtctgctccccgccacctccagggaatcacctgtcatggtggatgagtttgagctcacagccaggcctcccctatctcctgtgatcccctatcataaagcctgcacccatctctccctgtcattttcttcacactccactccccaaaaccaatgatctctctgactgtcccaagtctgaccctctaccagatctgatcctctacttctcttcctgcctcccgtaccctaatacctaattattttcctgtaccctgctgctcttcccataggcattctggggttagcttacagctcaggaatccaccaagataggatgtctattagtaaaaatacagataaatacttgggattcatccctgaccaaggagctagaatctgtatttttaacaaactcctctggtgattcttatgtacactgaaggctgagaaccacgagaaagtaacagtcaaaaaggattttaagttctcttgccaagctcctgataatccttgtgctctcttctcttcaagcaccctaccttcaacctcacttctgtcccctcacacacctatcccagacacacacctatttctaggtgtatagtgatgttctaaaaatgaatataaatccttggatcaccccaaggttgatatttggtaagatcaccaaattctcaccttgtgtactctatttcaccctaacccaattccttaagtctctggggccacatgtcagtgaagataaatttgagatcttaaatctccttccctgtgtcacatccttccctgcacccccaattattcatgtaggggagaggggtgggaaaaaaaacctcattataagctatcccctaatacccctggacccaaatttgcttaccttctctctctccctcaactcacctccctaatccctacatcccatttcccttctcacatcctagaggccacaatgctataagggaagggaaggtcaggacccaagttccataaggtgccccaagatctctcattatccccacgctacctccttgcccctctcccccactgccattcttttctgttctcttctccttgtatgttgactcttcttcatccccatgctattgtgggggttcccatgtggatccccaatccaattcattttcccagtgcctctgcccacctcttgatcattagccttccccaatcaccatatgccatctatcccacagtctgggaatgctcaacagggttgggaatagaaggatgagaaggagtcaggtagggctcaccactaccttgctgttttgttaagataaataaactagagctctcaagtctctcaaaattttcctcattctgtccctattccttccagctccaacctacgccaagattttaccttgttaccatggtaaatgtaaacccccaatccagctccccacctctgacattccctccacccccaacccattccagggttagtttactccctcagaggatcagtgtctcctaataccttaaatccaccaccagtttctccaaaccccgacacttctgcgagactcccgcagcggggcagaagggtctgccttgcagcatgcttaaccatcttgagcccctagaccctcatcttggacctccagcccctgcgactctccccaagctcctgcacccccagcccatctcctgccagtcacacaagggaggggtctgcctcgcaatcccagagacgactcagacagatgggggcgcgtgcagctggctggccccctgccccgcaagcccccacctcccacccacccccatgtccagggctaccttgctgtcgtggtggatgagcttgagctcatagtccggcaggatgtccctgcggctattcacgtcctccagcgccatctccaccgcgggctggcaggcctggccccctggccagcccccgctcatgggaaacagtgccccgatgtacactgcgcgccgttctgaggaggggtgcggggggacccgcgagtgaggccgcgggagatggggggagtgggaggcccacaccggagccacccctgccgccatcacaaccagaagcggcagtggccaccccacccgggcaaaaggggccccgggccccatggcgtggggggcaggggtagctgttggggagcgttaggagctcaggggggacacttttcctggggagggctgctaagagggtgccggggaggcgcctccatccctgattttgtggggaggagggggcgagggccccggagaagcagggaaggttggcttcctacggcccccgcggctctcgccaccgtcgccgccaccgcggactctcctcgcggactgactgaccgacggaggggaggaggaggagcaggagggagatgtggggctgggagggggctctgacgtcacgggcggcgcgcggcagcggggggtgggggggcgggcgggagctggggaggcaggaagggggcggggagggaagcgagcgccgaggtgggagcgacagtcggaggggcggggaggggaggggggatgcaacctcgaggaggaaaggaacgaaagaggaagggagggatctcacttaaggggacccgaggggaggagaaatggggacggggcgtgccaggagggcggggtgggcggagggagccgcgggaggctgaagcacggaggaaccagggtaggaagggaaggatgcgagtgggacgggagagaaacggggctggcgcctgaggtctgaagtgggagtatgagtcgatacagtgaagcactgaggatgtgggggagaggaaacggttttggagggaacgagttgggtacggaagggaggctggtttgagggagtggtggggtcgtggaagggagcctggggctgggtagacagaagcctaagaaagggagacaggacatggaattgagaaaagacgagggaaggggtacacggaaggaaaagatgtggggaagagcgcgagaggcctggccagggttgggatgggtgggacaggctgagaaagtccattaggtgaaatcctaggaggcagcaggctggaaaaggttccagcgaaggtcgcaaggaaccccacaggggaaaacgtggtgggagctcagggtctcccagcaccctgccgccctctgctgggctctgcctgacaccggcgaggctcagtctgggaggaggtggagcccagggaagtgtagccaagcagggacaaggagagaccgcagcctcgtggaaaaccgggactggaggcaggaaacaggtagggagggaagggggtggccgcaaactggggtgggttggggaaggtgcgaaaggacgacgccccgtagcctaagggcagaatttcaggggggtggagggtgcagagtgaaggggagggcattgcagtgcgcgcggtaagggtttctcatctcacctgagtgtggcgttcgattcactggcagcaggaaagacggggatcagagaagagttaccactggcgcccagcttccctggcctgatccccagccccctcccacacctgtccatgctgaagaccggggagagcagaagcctgcgtttctgaggggagggtgcctggggataagaacaaggtgggtctgggggtaagggggtcaggacttattttcttcttcgatttttcataggacaacagaatttgagacgggaatgccaatagctaagtttggggcagatcttggttctgtggtgcctgaatattacaaaattgggagtctttaagaaaaaaaattacacatacaattggctttaagcaattgctgttaaaatcttatttctgcaatttttacaaaagcctgttaccatatgaacacatatccatcgagccctctatattattagagcacaggaagagggccctgtaggtgaggaaccttgaagtctaagtttcagtagtgtcataagtccacccctggatgggactctcaatttccagaataaaatggtaaactagaagcagaataactgagttatgtgaggaaagtaaagcccaaggatcttgaaagaatctaccagggtagaggaagtatgaggcatacaaatgggatgactgcatcccaggagagaagatggcagagagttcgggtgcctagaaaagggagagtttgtaaaattacgtggcaaaaaaaaaaaaaaaaaagtagacagacacaacactgattcccttagggaataatggaggttgtctaggaagtacagaaaaggacctgtcttcttcccaccccatccctgagttgttcttcatcttctgataatgctgcctccaattttaagtcttttaccctaatatgtttccacccccagagctccccttctcaatttttcttagtagaatgtttgatttatttctgagtctttacaataaatcaattatataaggaatggtgagggatgaattctagaagagggtgatgcatggaaatttctaagtttagagaaagggaaaattggagtatttaaacctgaagaaggtgagagaggtgagattcataaaggaaaagagaaaacgtgaggtctaagaatcgggagcaggaagatttttttaaaaggtaaaggaaggaagcccccaacctacagaggataccggggactgcaagaggaagtttgaggcaggtgatggaggaaaaagggactttcatctcccctttccagtgtcctcccccacatttttatagctctccattctttcccattatccattcccaccccactcccatcctcacacaagcgtcctcatcagctgcatgcaggcagctgttcccctcaccctggcagtggggcttgggggtgctccactggccctgactacagatgctccgggagctgcccaccagatggaagtcggggtcacaccggaaatccacccgggctccgtccagagctgggaggtccccacccgtcaggaaaaccttcccattttccagggtcaaataagacttggagcagattcggactgtggagagataggaaaataagaagagaggcgagttgaagaaggctctttccctttaaagagcaggggactcaggtgcaggtttgggtccacaagcatcctgctctaaagaaaatcacatgtgaaaaggatttgcctacctatcttccaatcctcccttacctgtgcaagcatccacacattcccaaaagaaaaaaaaaattaccattttaggaacccaagatggggctataagcacacaaaatgggatctcttcaaagtcagctacagtgggcggttctctggctttgaaatatgtagatgtatataactttggatgcacaatcagatttgcttttcttattatagttggcttctattaatattaaactggcttttgtttcttgggcatatggtctctgggttggtgacagaggtattcaaaaatgtgatgaaatcattttagaatttttttgtcatcatctgccactaatgatcctcaaagagaataactgacaagatgaattatcaatgttataggccaatgatcagtggcctaatgaagggaggatgaaatgaactgtgcaggctgctagctctactacctccaaccgcacagagcaaaattgctcttatgtagtagtcattcaataaatgtatttgtgaattttggtatactggatttaaagtgctgacttgcaagcagtaatgctaagtttgcggcaggaaaaggaatagtcttgaagaggggaggggcttccgaggctactcaccacagcggctgggtgtgtccatatctgtccaggagccgttggccaggcacttgcggaccttgggccccaccacctcgcgctccccccggcacacatactcaatctcatagtccactggcaggaagttgatagccttcacctggtcccgagtcaggccccggtacctgatgcccccttcccagggcgggtgtatgatctggcaacctaaggggtgagtcggggaggcatacagagaggaatggtgggaaagaggaaaaggcaggctccccagtgggaggaaggggagagtagggcgtggtctgtgggcaggctggggacagaggaagagggatggggcactagagggtgggagtggggacaggtacagatcccctggctaaaggacagagagtaaagggccagggttaaagctgatgagagaacccacaagtggggagggaagggtgctgggtggaggtaagaaagaaaagtaattaagaaatcatgaagggtatgatatgtgggtggagcttttctttaaaaaaaaaggctaaatgaggatattcgagttgaattaggataggaggataaagggaggctaataagatcatctggacagcaaagtgggaccaagaaaagggagtaattgaggtagtaatgtggggctgggaaaggggattgaggcggagaaaatgcacaggaaggtggtatagtgtagcaatgtgggcagagaaaagaggtgctggatagtaacgtggggtgacagaaggaggtcagcagtagtaaagtcgggccgagcagaaggggttgccagaccgggatgatatgtgggactgatgggatagtgatgaggaccagaaatgaggagatgcagggaaagggaagtggagcgaaggagggccggaggtcgtcgaagaaggatgcaccttctgaggtggcgttgggggtctgcgccccgcccgcgcccggggggcggaggaagagtggcgccagtagcagcagcagcaacatctaagtgagaggcggccatgaggactggaccgagccccgccggcgcggcccgcacccggagactactcgacctcttgccggttgcctcgcaggctccgaccgggctcagcctggggaccaagagagcgccccgcggaggaggcgggggcggagccccgcgcggggtggggggagaggaggagagaaagcctgtccccaccctcctcctgcctccctcggcccccaaccctcccgggactccacctctcaccacctcctctcccccggcccccgcggctcgcagaagcctggcttacccacgctcccggcatcggccgcctcagcgctccccgattccatccccgcggttcctcctctcccccagccccgcttcccccagctgggccctgcgcccactgccccctcccccaccacgccgcgcgccccctctccgagccctgctaacccggggccctggctcttacctcggcgcgcgggcccggctccccggctctccccgggcctcaaggccccaggcccggccgctcctccccgctcccccctcccttctcctccacctttctcctcctcccgtccctcctcccctcgaatccaggctccagcctggccagggtctctcccctcctctctcgcttcccccaaaccccacccctgtctcttcttccccggggcggcggcagccacgggagcggggagcggggagccgggagggaaggaggcggcgccggggaccagggagagctcccgggcggagggaagaaggagggtgcaagggaaggcagggcggggggaagagaggggaagaccggggagagggcgcctcccacaacccgagccccgggagccgccccggatcccagccccgccctggaccgcccacagcgcggtggggcgggcggtggagaggcgcggggctgagaggtgggggagagggaggtgccctggtgcacacgcactcgtcggggggcgccggtcactgccgagggacctgcgggccaaacaactggaagctggggtgggggagagggaacccgagccaaaggcagaggagctggcgctgagacagggagtctgggatgaaggtggagaaagacggctgcacaaagagaaggcagccctagatccgggtgagaggagagaggcagaggcagatgcccaggagaactgcgaccggagggcgagaaagaagcctgggtcagaaggaggtgggggagggggactgaggaccacctaagcgcaagaagggttgggtgtagaagagatttctgggagactagagcagctccatggtccagcagcattgctactcgcctgctctgcagggaacgcgcagaacggattggaggcaaaaaacaaaacagggagggggacatcaaggagagaaattgaagtacgaagggagtaaaaggacaagagaaaagaacctcagggtggtttagaagccagtattacctgatgtactccagcagagcctagcaaacagtatttcttgaccaagggcaaactggaagctctaaagacagcaggtacagacctttttgacggctccagaagctcttggctataccttgaagtggaggggtgtgtgtgtgtgtgtgtgtgtgtgtgtgtgtgtgtgtgtgttgtgctgttgttgttcgtaggcctgagtttgggctgggagaggaaacagtgggctccttgttgggggggacaaaaaaaaagctgctttctggctggtcctagggggaaaaatggtaggaagaaaccaaacactgagagactgactagaattgagattctcaacctccaacccttttttacaataaatattttgtaatgacacttttactgtcctaaattgagattcatagatgaggctcacgcctgaaatcccagaactttgggaggccgaggcggactgatcacttgagctcaggagtttgagaccagcctggcctggccagcatggcgaaaccccatctctactaaaaatagaaaaattagcgtggtgtgatggtgtgcgcctgtaatcccagctgagacaccagaatcgcttgaacccgggaggcagaggttgcagtgagccaagatcgcaccactgcactccagcctgggtgacagagcaagactccatctcaaacaaaaagaaagggaaggagggagagaaagtcatagatgatataacctacctacatacacaactttaaacagaaagcaaaatgcttccctttctgtaacgtaaaggggaaatgaaagaaaagtaacttgcaataaaataacataaacagtattttaatgtgtgagtgccaaggcccgactaccctagaagtcctgatggagtaagcagatgcttccacctattcacagaaccacggggatgaaactgctaccaacacaggctgatccaggtgctgagttggtgactcaactacctccagcatgttgccatcaatgaagtgatttaacaaaatgttgaacaactcttggtagcaaagttaattttccctaattttacacacaactataattgcattcctagaaagttcactgtatatttaaaaaaaaattttaaaactgtattaagttataggctcagataattaaacacaggttttcactacgtgaatgtcctgggggacttttgagaatctgggtgaggaacaattcttcaacatgtaggtagtgctttgaagaatatcttacacctctgccccaaccataaatgtcaatagtgccccttcccttatcacctgaggttgggagttcgagaccagcctgaccagtgtggagaagccccaactctactaaaaatacaaaattagccaggcatggtggtgcatgcccgtaatcctagctactcaggaggctgaggcaggagaatcacttgaacccgggaggcggaggttgcagtgagccaagatcatgccatgccattgcacttcagcctgggtgacaagagtcaaactcagtcaaaaaaaaaaaaaaaaaaaaaaaacagctaaaagatgcatcaaaatgttaacaaggattgcctctgggccattaattgttgcataacttttcttttttacttttttttttttttaaacaagaagtttatttaaacaacaagacgcttgacttgaagggaaaactatctaggattcttttttgttttagagtaatttatccctacttaaagacagattgctctgcatgtaacagctaagtacaaaaaagttataaaattgtccttggttttacaatgataaatgaaaaacattaaaattctccaattgaacaaggtatgcaaggatttttatgttgttgtttttttgttgttgttgttaaaacagtgagagcaaaataacttactggaatataaagataagagctgaatgagcatgccactaatggagaaagggggtattttcacagaatcagtatttttccgccccgtctccacttgatgtcaatcaaaacataccattggctgtttagttttaaaaaaaaaaagtaatatgcttgtgcacatataccagttactttatgtacagtaaaggaatggggaagggggaaatgaaagaatagagaaaactatacggtagtagtcaggatgtggtggaagcaaattgcagttttctaattgagaatgtaatcttggtctttaaagaacagagttctggagtaaagaagcaggttcccttttcagtagacacctcccgtctgctgttggaacacatcaattgtatcttcatcctccatttccaactgtgcaggtgtgtctgtttcattggttgcccgtcgaatcggaatctgatctgcctcattgacaatccctgtcgttcacaataggctttcattagtttactaagtggtgtatgcctcttaatcttaaactgcaccacagaaccatcctgccccgccaccttcaaattaatatgatcgttgttctcagtcttgactccttccttgggcttttcttcggccatggcgagcgccggagtctcctcagctgccgcttcacaaaagaggtaccaggtccgctccaaacgagcacacaagcagcaccaggagcggcagaagaaggaggcggcagcagtggacaaggggagagggtgcgcgcacgtcgtgctctccctccctccaccctcacttttctttttttttctttcttttttttggtggggggacggagtttcactcttgtcacccaggctggagtgcaatggcgtgatctcgactgacggcgacttccgcctcccggattcaagcgattctcctgtctcagcctcccgagtagctgagactacaggtgcacaccaccatggctggctaaattttgtatttttagtagagacagggtttcacaatattggtcaggctggtctcgaactcctgacctcaggtgatccacctgcctcagcctcccaaagtgctgggattacaggcataagccactgtgcggggcctgcacacttttctttcgtcatatttgttgttcaacttttattcaaatgttttacaagtgtctcctctataaatcatttttaattgatttataaaggtttaaagaaaaccttcctagcaagttgcatcagtatagctaaaatctgttacttgtttgggaggcagaggcatttgagggtacagacaagggctccaattatgttcattatacaaaccactcacctttttccaccagtagctacaacttccccctttcacatcttttcatattccaatgtcactgccaggattcctggccatatttttcaggatatttgtagaggtccttccagaaccactacttgagtatcctaatttcatcctccccacaatcaatctacttccttcttttccttttacatcaagcacaaaacttctttcctctggaaggatccccaggcttgatcccatccttctctcacttctgtacaatttgtgcctttggcaatgccatctccttttgtagtttttgacggtttttcatagagatagtggagttcctactcagattactggaaaatgacaaatcttattcattttagttcccatactttctttttttttaataatttttattttttattcttatttatttatttttattttatttatttatttattttttgagacagtctcacactgtcgcccgggctggagtgcagtggcgcgatctcgctcactgcaacctctgcctcctgggttcaagcaattctcttgcctcagcctcctgagtagctgggaattaccggcgccccaccaccacgcccagctaattttttgtatttttagtagagacggggtttcaccatgttggccaggctggtctcaaactcctgacctcatgatctgcccgcctcagcctcccaaagtgctgggattacaggcatgagccacggggcctggcctcccatactttctttctacttccttttctctcttctgcctcatcttccatccatccctgagagcatatagcccagaatttaacactctgggagccctgaaaacatattaaccaacgtagttcacttgattgatgatc

SEQ ID NO: 336 - DNA, 1201 bp, Homo sapiens
cactatagacaagtttgtacaaaaaagcaggctggtaccggtccggaattcccgggataaattttgcaaaaataacaaggtcagaaaacctccatgtttctcatatcttgcaaaaagcaaaaattgaagtcagtgaagatggaaccaaagcttcagcagcaacaactgcaattctcattgcaagatcatcgcctccctggtttatagtagacagaccttttctgtttttcatccgacataatcctacaggtgctgtgttattcatggggcagataaacaaaccctgaagagtatacaaaagaaaccatgcaaagcaacgactactttgctacgaagaaagactcctttcctgcatctttcatagttctgttaaatatttttgtacatcgcttctttttcaaaactagttcttaggaacagactcgatgcaagtgtttctgttctgggaggtattggagggaaaaaacaagcaggatggctggaacactgtactgaggaatgaatagaaaggcttccagatgtctaamagattctttaaactactgaactgttacctaggttaacaaccctgttgagtatttgctgtttgtccagttcaggaatttttgttttgttttgtctatatgtgcggcttttcagaagaaatttaatcagtgtgacagaaaaaaaaatgttttatggtagcttttactttttatgaaaaaaaaattatttgccttttaaattcttttcccccatccccctccaaagtcttgatagcaagcgttattttgggggtagaaacggtgaaatctctagcctctttgtgtttttgttgttgttgttgttgttgttttatataatgcatgtattcactaaaataaaatttaaaaaactcctgtcttgctagacaaggttgctgttgtgcagtgtgcctgtcactactggtctgtactccttggatttgcattttttgtattttgtacaaagtaaaaataaactgttatgagtagtaaaaaaaaaaaaaaaaaaaammmvvmmmmmavrvvvvscccssggggggtttttttttttttttttttttttttttkggkbwgtttttttttccmcttttttttaaaagggsccyawakkgrkktwtwaaamaaggccggsgggtttaaaggggggggggaaagsrgkkgggtttkgrgggmcttttykggggggaaaakggaaamcc

SEQ ID NO: 337 - DNA, 1201 bp, Homo sapiens
  misc_feature (13)..(15): n is a, c, g, or t
  misc_feature (17)..(17): n is a, c, g, or t
  misc_feature (19)..(21): n is a, c, g, or t
  misc_feature (28)..(29): n is a, c, g, or t
  misc_feature (39)..(39): n is a, c, g, or t
  misc_feature (41)..(41): n is a, c, g, or t
  misc_feature (43)..(43): n is a, c, g, or t
  misc_feature (1028)..(1028): n is a, c, g, or t
  misc_feature (1032)..(1032): n is a, c, g, or t
  misc_feature (1084)..(1084): n is a, c, g, or t
kkkkgcttgtgcnnntncnnnccysccnntcccggcgtncngnccagtcgtcacaggcaactgcacaacascaaccyygtctagcaaggvaggggtgttkggggtkkggkkttggtggttasatgcgttakataagagrdcaacaacaacaacaacaaaaagagagaggggctagkkgttttaccgtttctkcccccaaaattacgsttgckatcaagakttkkktgggggatgggggaaaagaatttaaaaggcaaatwatttttttttcataaaaagtaaaagctaccataaaacatttttttttctgttacactgattaaatttcttctgaaaagccgcacatatagacaaaacaaaacaaaaattcctgaactggacaaacagcaaatactcaacagggttgttaacctaggtaacagttcagtagtttaaagaatcttttagacatctggaagcctttytwttcattcctcagtacagtgttccagccatcctgcttgttttttccctccaatacctcccagaacagaaacacttgcatcgagtctgttcctaagaactagttttgaaaaagaagcgatgtacaaaaatatttaacagaactatgaaagatgcgggaaaggagtgtttcttcgtagcaaagtagtggttgctttgcatggtttcttttgtatactcttcagggtttgtttatctgccccatgaataacacagcacctgtaggattatgtcggatgaaaaacagaaaaggtctgtctactataaaccagggaggcgatgatcttgcaatgagaattgcagttgttgctgctgragctttggttccatcttcactgacttcaatttttgctttttgcaagatatgagaaacatggaggttttctgaccttgttatttttgcaaaatttatcccgggrattccgggacggtaccagcctgcttttttgtamaacttgttctatagtktamctaaataggcytvkggkbbbssbbbbbbkymykbkttttttttyktyyscssctmnstwnaggggggggggggakggtcggrgatwyaagrrgraaaaagaggggggggggngggggggggagggagagaaggagtggtkaaaggagtaamggacaggagagggwttggggagggggggggggaggatwgggggggggggttggggaaaaaacaagggggdgggggggg

SEQ ID NO: 338 - DNA, 630 bp, Homo sapiens
  misc_feature (583)..(583): n is a, c, g, or t
ttgttgttaaaaagggcctactacattggcgctattcttaggacttctgcaacttttaaagtcttacttgtctttcttgttgcttttgtattaggagttccccgtgtgggtctagaactcccctttggtaatgcttctttgtttttttatggcccttctgttctcaggatggagagaacacagaagctactatccatgtcaggatttattctatttatatcttattacaataaaattagtggcactttattcataaatattcatgagcctgttaattgttagttgtcttcctgtagctgaatcaacaagttattttcaactcaattttatgacttgcgaaaaagcttttgccctgttgtgtaccataacatttaaaagaatggaaaatgactgaaatccaatttagattatttttagagtatttttccagcaaattcaatttattctgaaatttaaatccagatcttttctaatatggtattacaatgaaaagaattaagagaagattgaaatttcagtttcattttcaaaaactatttaccaaaacaaatggagaagaaacaccaaaagcacatttcatttntccaaacttgtgttttaaatatagttttaaattgaaggtaattttaa

SEQ ID NO: 339 - DNA, 1296 bp, Homo sapiens
  misc_feature (71)..(72): n is a, c, g, or t
  misc_feature (75)..(75): n is a, c, g, or t
  misc_feature (77)..(77): n is a, c, g, or t
gcagggttcgactctagaggatccccctggggcccttactctagcgggtactcactctgtcgtgcgagaanncanancttattttccaggtggcagtgctccttttggacttttctctaggtttggcgctaaactcttcttgtgagctcactccaccccttcttcctccctttaacttatccattcacttaaaacattagctggtcatctggtaagcccgggacagtaagccgagtggctgttggagtcggtattgttggtaatggtggaggaagagaggccttcccgctgaggctggggtggggcggatcggtgttgcttgcctgcagagagggtggggagtgaatgtgcacccttgggtgggcctgcagccatccagctgaaagttacaaaaatgcttcatggaccgtggtttgttactatagtgttcctcatggcgagcagatggaaccgggagacatggagtccctggccagtgtgagtcctagcattgcaggaggggagaccctggaggagagagcccgcctcaattgatgcctgcagattgaatttccagaggcttaggaggaggaagttctccaatgttctgttttccaggccttgcttcaggaagccctgtattcaggaggctaccatttaaagtttgcagatgagcttatggggggcaaaccttaaaaagtcccacagcagatgcatccggcctcgaggggcccatcagctttgaaataaatgcttgttccagagccccatgaaatgccagcaggcacccctcctttcctcggggtaaaggttttcagatgctgcatcttcctaaaattgagcctccggtcatactagttttgtgcttgggaaccttgcttcaagaagatccctaagctgtagaacattttaacgttgatgccacaacgcagattgatgccttgtagatggagcttgcagatggagccccgtgacctctcacctacccacctgtttgcctgccttcttgtgcgtttctcggagaagttcttagcctgatgaaataacttggggcgttgaagagctgtttaattttaaatgccttagactggggatatattagaggaagcagattgtcaaattaagggtgtcattgtgttgtgctaaacgctgggagggtacaagttggtcattcctaaatctgtgtgtgagaaatggcaggtctagcttgggcattgtgattgcattgcagattactaggagaagggaatggtgggtacaccggtagtgctcttttgttcttgcttcgtttttttaaacttgaactttacaacgtta

SEQ ID NO: 340 - DNA, 3778 bp, Homo sapiens
ctgcgccctccggccgccggtggccctctgtgcggtgggggaaggggtcgacgtggctcagctttttggattcagggagctcgggggtgggaagagagaaatggagttccaggggcgtaaaggagagggagttcgccttccttcccttcctgagactcaggagtgactgcttctccaatcctcccaagcccaccactccacacgactccctcttcccggtagtcgcaagtgggagtttggggatctgagcaaagaacccgaagaggagttgaaatattggaagtcagcagtcaggcaccttcccgagcgcccagggcgctcagagtggacatggttggggaggcctttgggacaggtgcggttcccggagcgcaggcgcacacatgcacccaccggcgaacgcggtgaccctcgccccaccccatcccctccggcgggcaactgggtcgggtcaggaggggcaaacccgctagggagacactccatatacggcccggcccgcgttacctgggaccgggccaacccgctccttctttggtcaacgcaggggacccgggcgggggcccaggccgcgaaccggccgagggagggggctctagtgcccaacacccaaatatggctcgagaagggcagcgacattcctgcggggtggcgcggagggaatcgcccgcgggctatataaaacctgagcagagggacaagcggccaccgcagcggacagcgccaagtgaagcctcgcttcccctccgcggcgaccagggcccgagccgagagtagcagttgtagctacccgcccaggtagggcaggagttgggaggggacagggggacagggcactaccgaggggaacctgaaggactccggggcagaacccagtcggttcacctggtcagccccaggcctcgccctgagcgctgtgcctcgtctccggagccacacgcgctttaaaaaggaggcaagacagtcagcctctggaaattagacttctccaaatttttctctagccctttgggctcctttacctggcatgtaggatgtgcctagggagataaacggttttgctttagttgtcgccaaggcagttcccttccaaactagcgctagagcgaatgagcgagcagccaggaccaccattctgggtttccaacaggcgaaaaggccctttctgagtttgaaatgtcacagggttcctaacaggccactcttccctggatggggtgccaacgcctttcccatgggcatctccttccaccctcacgctggcccagcaagcaggcagtgctgaggccttatctccctaggtgacagatgtggtcagggaggcgcagagaggatgggcactagcgtccagctcctggaacaggtgtcaggcagggagggcagacaggtcttgggaacatgttcccctggctatgtggacagaggacttctcagtgggtctcgcgaccctgtgccccttttcctggttcagggcagccttagccggggcaaaggtcgagaagagaacccctggtcgccgccctggcagaatttgagtggctccggcaggagatgtccctaggttcctggggagggaggacgtcggggccagccaggcttacccccccctgccgctgagacttctgcgctgatgcacgcgcctcttcgcggtctccctgtccttgcagaaactagacacaatgtgcgacgaagacgagaccaccgccctcgtgtgcgacaatggctccggcctggtgaaagccggcttcgccggggatgacgcccctagggccgtgttcccgtccatcgtgggccgcccccgacaccaggtcaggctgcccctccgcagagggagccggctcggggtccccgcgtaagccagcctggtgccacccggagcggcgttaacgggtgcgtggtgtctcggctctgcagggcgtcatggtcggtatgggtcagaaagattcctacgtgggcgacgaggctcagagcaagagaggtatcctgaccctgaagtaccctatcgagcacggcatcatcaccaactgggatgacatggagaagatctggcaccacaccttctacaacgagcttcgcgtggctcccgaggagcaccccaccctgctcaccgaggcccccctcaatcccaaggccaaccgcgagaagatgacccagatcatgtttgagaccttcaacgtgcccgccatgtacgtggccatccaggccgtgctgtccctctacgcctccggaaggaccaccggtgagtgcccgctggcccccagtcccctcgtcccgcccccgcccccgcccccgcccccggccgctagcgctgagcgcctagcctcggcctcgcccccagccactcactctctcccgcgcgcgcacaggcatcgtgctggactccggcgacggcgtcacccacaacgtgcccatttatgagggctacgcgctgccgcacgccatcatgcgcctggacctggcgggccgcgatctcaccgactacctgatgaagatcctcactgagcgtggctactccttcgtgaccacaggtgcgcggcgcccctgcacccgggcggagggccgcggcggcctgagtgagggctcctctcctgcttctgccctccgcagctgagcgcgagatcgtgcgcgacatcaaggagaagctgtgctacgtggccctggacttcgagaacgagatggcgacggccgcctcctcctcctccctggaaaagagctacgagctgccagacgggcaggtcatcaccatcggcaacgagcgcttccgctgcccggagacgctcttccagccctccttcatcggtgagccccgctcgccctcgccccggcccccaggcccgcgccccccggcccgagcttctgctcacgctccccgccgcggtccccaggtatggagtcggcgggcattcacgagaccacctacaacagcatcatgaagtgtgacatcgacatcaggaaggacctgtatgccaacaacgtcatgtcggggggcaccacgatgtaccctgggatcgctgaccgcatgcagaaagagatcaccgcgctggcacccagcaccatgaagatcaaggtgggtggtggcctgcgcgggctgtcggcggggtgggctccagggtgaggtctccccacctcacgcgctgtcttgcagatcatcgccccgccggagcgcaaatactcggtgtggatcggcggctccatcctggcctcgctgtccaccttccagcagatgtggatcaccaagcaggagtacgacgaggccggcccttccatcgtccaccgcaaatgcttctagacacactccacctccagcacgcgacttctcaggacgacgaatcctctcaatgggggggcggctgagctccagccaccccgcagtcactttctttgtaacaactttccgttgctgccatcgtaaactgacacagtgtttataacgtgtacatacattaacttattacctcattttgttatttttcgaaacaaagccctgtggaagaaaatggaaaacttgaagaagcattaaagtcattctgttaagctgcgtaaagtggtcgtgtttatttgcttggggcgggagtggagcaggaagagggattcccatcccccacatcctcttaagtcacttttcacgataccccaaatgaatgggctccttggaagacaaaacttacatcttcccatgctccctgccggtttctgcagtggatcagatccattccagatcactggcagctagtggtggcctgacttgacctctggggtgtggcgaggcgagctttct

SEQ ID NO: 341 - DNA, 1787 bp, Homo sapiens
cgccccgcgagcacagagcctcgcctttgccgatccgccgcccgtccacacccgccgccagctcaccatggatgatgatatcgccgcgctcgtcgtcgacaacggctccggcatgtgcaaggccggcttcgcgggcgacgatgccccccgggccgtcttcccctccatcgtggggcgccccaggcaccagggcgtgatggtgggcatgggtcagaaggattcctatgtgggcgacgaggcccagagcaagagaggcatcctcaccctgaagtaccccatcgagcacggcatcgtcaccaactgggacgacatggagaaaatctggcaccacaccttctacaatgagctgcgtgtggctcccgaggagcaccccgtgctgctgaccgaggcccccctgaaccccaaggccaaccgcgagaagatgacccagatcatgtttgagaccttcaacaccccagccatgtacgttgctatccaggctgtgctatccctgtacgcctctggccgtaccactggcatcgtgatggactccggtgacggggtcacccacactgtgcccatctacgaggggtatgccctcccccatgccatcctgcgtctggacctggctggccgggacctgactgactacctcatgaagatcctcaccgagcgcggctacagcttcaccaccacggccgagcgggaaatcgtgcgtgacattaaggagaagctgtgctacgtcgccctggacttcgagcaagagatggccacggctgcttccagctcctccctggagaagagctacgagctgcctgacggccaggtcatcaccattggcaatgagcggttccgctgccctgaggcactcttccagccttccttcctgggcatggagtcctgtggcatccacgaaactaccttcaactccatcatgaagtgtgacgtggacatccgcaaagacctgtacgccaacacagtgctgtctggcggcaccaccatgtaccctggcattgccgacaggatgcagaaggagatcactgccctggcacccagcacaatgaagatcaagatcattgctcctcctgagcgcaagtactccgtgtggatcggcggctccatcctggcctcgctgtccaccttccagcagatgtggatcagcaagcaggagtatgacgagtccggcccctccatcgtccaccgcaaatgcttctaggcggactatgacttagttgcgttacaccctttcttgacaaaacctaacttgcgcagaaaacaagatgagattggcatggctttatttgttttttttgttttgttttggttttttttttttttttggcttgactcaggatttaaaaactggaacggtgaaggtgacagcagtcggttggagcgagcatcccccaaagttcacaatgtggccgaggactttgattgcacattgttgtttttttaatagtcattccaaatatgagatgcgttgttacaggaagtcccttgccatcctaaaagccaccccacttctctctaaggagaatggcccagtcctctcccaagtccacacaggggaggtgatagcattgctttcgtgtaaattatgtaatgcaaaatttttttaatcttcgccttaatacttttttattttgttttattttgaatgatgagccttcgtgcccccccttcccccttttttgtcccccaacttgagatgtatgaaggcttttggtctccctgggagtgggtggaggcagccagggcttacctgtacactgacttgagaccagttgaataaaagtgcacacctt

SEQ ID NO: 342 - DNA, 1919 bp, Homo sapiens
gtctcagtcgccgctgccagctctcgcactctgttcttccgccgctccgccgtcgcgtttctctgccggtcgcaatggaagaagagatcgccgcgctggtcattgacaatggctccggcatgtgcaaagctggttttgctggggacgacgctccccgagccgtgtttccttccatcgtcgggcgccccagacaccagggcgtcatggtgggcatgggccagaaggactcctacgtgggcgacgaggcccagagcaagcgtggcatcctgaccctgaagtaccccattgagcatggcatcgtcaccaactgggacgacatggagaagatctggcaccacaccttctacaacgagctgcgcgtggccccggaggagcacccagtgctgctgaccgaggcccccctgaaccccaaggccaacagagagaagatgactcagattatgtttgagaccttcaacaccccggccatgtacgtggccatccaggccgtgctgtccctctacgcctctgggcgcaccactggcattgtcatggactctggagacggggtcacccacacggtgcccatctacgagggctacgccctcccccacgccatcctgcgtctggacctggctggccgggacctgaccgactacctcatgaagatcctcactgagcgaggctacagcttcaccaccacggccgagcgggaaatcgtgcgcgacatcaaggagaagctgtgctacgtcgccctggacttcgagcaggagatggccaccgccgcatcctcctcttctctggagaagagctacgagctgcccgatggccaggtcatcaccattggcaatgagcggttccggtgtccggaggcgctgttccagccttccttcctgggtatggaatcttgcggcatccacgagaccaccttcaactccatcatgaagtgtgacgtggacatccgcaaagacctgtacgccaacacggtgctgtcgggcggcaccaccatgtacccgggcattgccgacaggatgcagaaggagatcaccgccctggcgcccagcaccatgaagatcaagatcatcgcacccccagagcgcaagtactcggtgtggatcggtggctccatcctggcctcactgtccaccttccagcagatgtggattagcaagcaggagtacgacgagtcgggcccctccatcgtccaccgcaaatgcttctaaacggactcagcagatgcgtagcatttgctgcatgggttaattgagaatagaaatttgcccctggcaaatgcacacacctcatgctagcctcacgaaactggaataagccttcgaaaagaaattgtccttgaagcttgtatctgatatcagcactggattgtagaacttgttgctgattttgaccttgtattgaagttaactgttccccttggtatttgtttaataccctgtacatatctttgagttcaacctttagtacgtgtggcttggtcacttcgtggctaaggtaagaacgtgcttgtggaagacaagtctgtggcttggtgagtctgtgtggccagcagcctctgatctgtgcagggtattaacgtgtcagggctgagtgttctgggatttctctagaggctggcaagaaccagttgttttgtcttgcgggtctgtcagggttggaaagtccaagccgtaggacccagtttcctttcttagctgatgtctttggccagaacaccgtgggctgttacttgctttgagttggaagcggtttgcatttacgcctgtaaatgtattcattcttaatttatgtaaggttttttttgtacgcaattctcgattctttgaagagatgacaacaaattttggttttctactgttatgtgagaacattaggccccagcaacacgtcattgtgtaaggaaaaataaaagtgctgccgtaacc

SEQ ID NO: 343 - DNA, 937 bp, Homo sapiens
tggttgagcacagggtactttattgatggtacatgacaaggtgcggctccctaggcccctcccctcttcaaggggtctacatggcaactgtgaggaggggagattcagtgtggtgggggactgagtgtggcagggactccccagcagtgagggtctctctcttcctcttgtgctcttgctggggctggtggtccaggggtcttactccttggaggccatgtgggccatgaggtccaccaccctgttgctgtagccaaattcgttgtcataccaggaaatgagcttgacaaagtggtcgttgagggcaatgccagccccagcgtcaaaggtggaggagtgggtgtcgctgttgaagtcagaggagaccacctggtgctcagtgtagcccaggatgcccttgagggggccctccgacgcctgcttcaccaccttcttgatgtcatcatatttggcaggtttttctagacggcaggtcaggtccaccactgacacgttggcagtggggacacggaaggccatgccagtgagcttcccgttcagctcagggatgaccttgcccacagccttggcagcgccagtagaggcagggatgatgttctggagagccccgcggccatcacgccacagtttcccggaggggccatccacagtcttctgggtggcagtgatggcatggactgtggtcatgagtccttccacgataccaaagttgtcatggatgaccttggccaggggtgctaagcagttggtggtgcaggaggcattgctgatgatcttgaggctgttgtcatacttctcatggttcacacccatgacgaacatgggggcatcagcagagggggcagagatgatgacccttttggctcccccctgcaaatgagccccagccttctccatggtggtgaagacgccagtggactccacgacgtactcagcg

SEQ ID NO: 344 - DNA, 1677 bp, Homo sapiens
attcacgagtcctgcatgagccagataggctggaaccgcatcatcgtggagaagcccttcgggagggacctgcagagctctgaccggctgtccaaccacatctcctccctgttccgtgaggaccagatctaccgcatcgaccactacctgggcaaggagatggtgcagaacctcatggtgctgagatttgccaacaggatcttcggccccatctggaaccgggacaacatcgcctgcgttatcctcaccttcaaggagccctttggcactgagggtcgcgggggctatttcgatgaatttgggatcatccgggacgtgatgcagaaccacctactgcagatgctgtgtctggtggccatggagaagcccgcctccaccaactcagatgacgtccgtgatgagaaggtcaaggtgttgaaatgcatctcagaggtgcaggccaacaatgtggtcctgggccagtacgtggggaaccccgatggagagggcgaggccaccaaagggtacctggacgaccccacggtgccccgcgggtccaccaccgccacttttgcagccgtcgtcctctatgtggagaatgagaggtgggatggggtgcccttcatcctgcgctgcggcaaggccctgaacgagcgcaaggccgaggtgaggctgcagttccatgatgtggccggcgacatcttccaccagcagtgcaagcgcaacgagctggtgatccgcgtgcagcccaacgaggccgtgtacaccaagatgatgaccaagaagccgggcatgttcttcaaccccgaggagtcggagctggacctgacctacggcaacagatacaagaacgtgaagctccctgacgcctacgagcgcctcatcctggacgtcttctgcgggagccagatgcacttcgtgcgcagcgacgagctccgtgaggcctggcgtattttcaccccactgctgcaccagattgagctggagaagcccaagcccatcccctatatttatggcagccgaggccccacggaggcagacgagctgatgaagagagtgggtttccagtatgagggcacctacaagtgggtgaacccccacaagctctgagccctgggcacccacctccacccccgccacggccaccctccttcccgccgcccgaccccgagtcgggaggactccgggaccattgacctcagctgcacattcctggccccgggctctggccaccctggcccgcccctcgctgctgctactacccgagcccagctacattcctcagctgccaagcactcgagaccatcctggcccctccagaccctgcctgagcccaggagctgagtcacctcctccactcactccagcccaacagaaggaaggaggagggcgcccattcgtctgtcccagagcttattggccactgggtctcactcctgagtggggccagggtgggagggagggacaagggggaggaaaggggcgagcacccacgtgagagaatctgcctgtggccttgcccgccagcctcagtgccacttgacattccttgtcaccagcaacatctcgagccccctggatgtcccctgtcccaccaactctgcactccatggccaccccgtgccacccgtaggcagcctctctgctataagaaaagcagacgcagcagctgggacccctcccaacctcaatgccctg

SEQ ID NO: 345 - DNA, 1955 bp, Homo sapiens
gaattcaccaagcgttggattgttcacccactaatagggaacgtgagctgggtttagaccgtcgtgagacaggttagttttaccctactgatgatgtgttgttgccatggtaatcctgctcagtacgagaggaaccgcaggttcagacatttggtgtatgtgcttggctgaggagccaatggggcgaacgtaccatctgtgggattatgactgaacgcctctaagtcagaatcccgcccaggcgaacgatacggcagcgccgcggagcctcggttggcctcggatagccggtcccccgcctgtccccgccggcgggccgcccccccctccagcgccccgcgcgcgcgggagggcgcgtgccccgccgcgcgccgggaccggggtccggtgcggagtgcccttcgtcctgggaaacggggcgcggccggaaaggcggccgccccctcgcccgtcacgcaccgcacgttcgtggggaacctggcgctaaaccattcgtagacgacctgcttctgggtcggggtttcgtacgtagcagagcagctccctcgctgcgatctattgaaagtcagccctcgacacaagggtttgtccgcgcgcgcggcggcgtgcgtgcggggggcccggcggggcgtgcgcgtccggcgccgtccgtccttccgttcgtcttcctccctcccggcctctccgccgaccgcgggcgtggtgggggggtgggggggggacgcgcgaccccggtcggcgcgccccgcttcttcggttcccgcctcctccccgttcaccgcggggcggctcgtccgctccgggccgggacggggtccggggagcgtggtttgggagccgcggaggcggccgcgccgagccgggcccgtgcgcggtccccgtcccgggggttggccgcgcgggccccggtggggccacccggggtcccggccctcgcgcgtccttcctctcgctcctccgcacgggtcgaccagcagaccgcgggtggtgggcggcgggcggcgaggccgcacgggcgtccccgcacccggccgacctccgctcgtgacctctcctcggtcgggctccggggtcgaccgcctgccccgcgggcgtgagactcagccgctgtctcgccgtgtcccgggtcgaccggcgggcttctccaccgagcggcgtgtaggagtgcccgtcgggacgaaccgcaaccggagcgtccccgtctcggtcggcacctccggggtcgaccagctgccgcccgcgagctccggacttagccggcgcctgcacgtgtcccgggtcgaccagcaggcggccgcgacgtgcggcgcaccgacgagagggcgtgcattcccgttcgcgcgcccggaccctccaccggcctgggcccgacggtggagctgggaccacgcggaactccctctcctacatttttttcagccccaccgcgagtttgcgtccgcgggattttaagagggagtcactgctgccgtcagccagtaatgcttcctccttttttgcttttaggttttgctcttgcctttttttttttttttttctttctttctttctttctttctttctttctttctttctttctttctttctcgctctcgcctctcgctctctccctcgctcgttttctttctctttctctttctctctctctctctctctctctctctctgtctctcgctctcgccctctctctctctctcttctctctgtctctctctgtctctctctctctctctctctctctctctctctctctctctctctctctctccctccccctccctccctctctccccttccttggtgccttctcggctcttgacacttagccgctgtctcgccgtgtcccgggtcgaccggcgggccttctccaccgagcggcgtgtaagagtgcccgtcgggacgagccggacccgccgcgtccccgtctcggtcggcactccggggtcgaccagctg

SEQ ID NO: 346 - DNA, 1969 bp, Homo sapiens
  misc_feature (57)..(61): n is a, c, g, or t
ccgtccgtccgtcgtcctcctcgcttgcggggcgccgggcccgtcctcgagcccccnnnnnccgtccggccgcgtcggggcctcgccgcgctctacctacctacctggttgatcctgccagtagcatatgcttgtctcaaagattaagccatgcatgtctaagtacgcacggccggtacagtgaaactgcgaatggctcattaaatcagttatggttcctttggtcgctcgctcctctcctacttggataactgtggtaattctagagctaatacatgccgacgggcgctgacccccttcgcgggggggatgcgtgcatttatcagatcaaaaccaacccggtcagcccctctccggccccggccggggggcgggccgcggcggctttggtgactctagataacctcgggccgatcgcacgccccccgtggcggcgacgacccattcgaacgtctgccctatcaactttcgatggtagtcgccgtgcctaccatggtgaccacgggtgacggggaatcagggttcgattccggagagggagcctgagaaacggctaccacatccaaggaaggcagcaggcgcgcaaattacccactcccgacccggggaggtagtgacgaaaaataacaatacaggactctttcgaggccctgtaattggaatgagtccactttaaatcctttaacgaggatccattggagggcaagtctggtgccagcagccgcggtaattccagctccaatagcgtatattaaagttgctgcagttaaaaagctcgtagttggatcttgggagcgggcgggcggtccgccgcgaggcgagccaccgcccgtccccgccccttgcctctcggcgccccctcgatgctcttagctgagtgtcccgcggggcccgaagcgtttactttgaaaaaattagagtgttcaaagcaggcccgagccgcctggataccgcagctaggaataatggaataggaccgcggttctattttgttggttttcggaactgaggccatgattaagagggacggccgggggcattcgtattgcgccgctagaggtgaaattcttggaccggcgcaagacggaccagagcgaaagcatttgccaagaatgttttcattaatcaagaacgaaagtcggaggttcgaagacgatcagataccgtcgtagttccgaccataaacgatgccgaccggcgatgcggcggcgttattcccatgacccgccgggcagcttccgggaaaccaaagtctttgggttccggggggagtatggttgcaaagctgaaacttaaaggaattgacggaagggcaccaccaggagtggagcctgcggcttaatttgactcaacacgggaaacctcacccggcccggacacggacaggattgacagattgatagctctttctcgattccgtgggtggtggtgcatggccgttcttagttggtggagcgatttgtctggttaattccgataacgaacgagactctggcatgctaactagttacgcgacccccgagcggtcggcgtcccccaacttcttagagggacaagtggcgttcagccacccgagattgagcaataacaggtctgtgatgcccttagatgtccggggctgcacgcgcgctacactgactggctcagcgtgtgcctaccctacgccggcaggcgcgggtaacccgttgaaccccattcgtgatggggatcggggattgcaattattccccatgaacgaggaattcccagtaagtgcgggtcataagcttgcgttgattaagtccctgccctttgtacacaccgcccgtcgctactaccgattggatggtttagtgaggccctcggatcggccccgccggggtcggcccacggcctggcggagcgctgagaagacggtcgaacttgactatctagaggaagtaaaagtcgtaacaaggtttccgtaggtgaacctgcggaaggatcatta

SEQ ID NO: 347 - DNA, 929 bp, Homo sapiens
cggttggggctctggtcttggatttgatgtgtggcgaaggctgcaattgtttaataacccttcatgattcaacagctcttcaagaactttcctctgttcttgtgtggagctcgtgacagccagtggtggtggagctccagccctctcttcccacaggcacaagccgggttcctgagtcccagggcttctcgggaggtgtctgccctcctctttcagacaccctctgccctgtgtcccagggccctgggcctgtgctgcactgagcagagactgtaggggaccggctctcccactcctcccagatgggcagcgtcttccgtgtcgggagcatgctgtgctgcttttctcttctcagtctcttagtttttgcgggttcttacgcatgtgaggtgtggacttgcatggtggggagctcaaatggtacatgaaggggaggagccctctgagtgctgtgatttgttccatcattaccgcttcctgatcacggtgacctgcactgctggagtggtcagtggagccaggcctccccacaacagtgttcccatcgccttcttactattgatttctattcttaaaatattgtattacttagcactcttttgaagacgttccagtatatatcaaatgatcaaaagtccataaccttgtcctacgtagaagccaaaggtgtcatgcagtttcaggtgttcgagtttccagaattcttgtgatgacatttgtaggattcttcttttagacttggaccaaattctgtaacctaatatttgtccttcagattgacagagaaccgcaggcaggtgttttctctgtcacacgtgtggtgggtggcatcctggtgacataaagaattgcctttggtaacttgcccagaaggctgtagggttattttctgcttagactttcccctatttctttcttttcttttctcg

SEQ ID NO: 348 - DNA, 657 bp, Homo sapiens
  misc_feature (326)..(326): n is a, c, g, or t
  misc_feature (374)..(374): n is a, c, g, or t
  misc_feature (402)..(402): n is a, c, g, or t
  misc_feature (423)..(423): n is a, c, g, or t
  misc_feature (437)..(437): n is a, c, g, or t
  misc_feature (471)..(471): n is a, c, g, or t
  misc_feature (490)..(490): n is a, c, g, or t
  misc_feature (493)..(493): n is a, c, g, or t
  misc_feature (515)..(515): n is a, c, g, or t
  misc_feature (530)..(530): n is a, c, g, or t
  misc_feature (542)..(542): n is a, c, g, or t
  misc_feature (558)..(558): n is a, c, g, or t
  misc_feature (576)..(576): n is a, c, g, or t
  misc_feature (583)..(583): n is a, c, g, or t
  misc_feature (588)..(588): n is a, c, g, or t
  misc_feature (590)..(590): n is a, c, g, or t
  misc_feature (594)..(594): n is a, c, g, or t
  misc_feature (597)..(597): n is a, c, g, or t
  misc_feature (604)..(604): n is a, c, g, or t
  misc_feature (608)..(608): n is a, c, g, or t
  misc_feature (612)..(612): n is a, c, g, or t
  misc_feature (625)..(625): n is a, c, g, or t
  misc_feature (631)..(631): n is a, c, g, or t
  misc_feature (634)..(634): n is a, c, g, or t
  misc_feature (649)..(650): n is a, c, g, or t
attttagggaggtagtagatgatttttagggaatttgatgggccagaagaacatacaatggattgggacaaagtctgttgggcagacaatggtttgtgacaaaattctgtccaggtgtgttgaccgaattcaggctttctttatgcgatatgagttcagttaatgaaaacacaggggagtgaccagaagtgattgtttccttctttggcgtttctgtcttcctccttttttgttctattcccttattttgcaaccttttggatgttaccctttggaagttaccctcttgtaacttccacattaaaagtttgggggctggctgatanaaggaactccagagaacaacttgattctgtgctttgggagagacaganaaatgaggggtgtggaggaaggtcaganagaccctgaggcctctgcctncttcagcatgtcanagcaccctattttggggcttgctttctgagcccnaacatctccagccttccangantctgtggcttatccttcccaangataggatcacttgncactctactgancctaagttgtattcantttcttttgatccgcctngactctntagcnantganaancacaacntggnaacnaaccctcataaanctgctntancttctggttttaagnncaaaaca

SEQ ID NO: 349 - DNA, 758 bp, Homo sapiens
cgcacatgtggtggctactagttcctggaatagcaaagcaattgctacctccatgccttttcagttgctttagataagacctgttttgcacctgagaaaacagaaagatcagagcagcttttttgtgtgttttgtttacacagtgttgttgtattttcatttgctctagacttcaaggcagatgcaaaagaaaatgaaaaacaacttaggttcagtagactggtcaagtgatcctattcctttggggaaggatatgccacagactcctggaaggctggagatgttggggctcagaaagcaataccccaaaatagggtgctttgacatgctgaagtgaggcagaagcctcagggtctctctgaccttcctccacacccctcatttctctgtctctcccaaagcacagaatcaagttgttctctggagttccttctatctgccagcccccaaacttttaatgtggaagttacaagagggtaacttccaaagggtaacatccaaaaggttgcaaaataagggaatagaacaagaaaggaggaagacagagacgccaaagaaggaaacaatcacttctggtcactcccctgtgttttcattaactgaactcatatcgcataaagaaagcctgaattcggtcgacacacctggacagaattttgtcactaaccattgtctgcccaacagactttgtcccaatccattgtatgttcttcaggcccatcaaattccctaaaaatcatctactacctccctaaaat

SEQ ID NO: 350 - DNA, 700 bp, Homo sapiens
cggtcaacccaacacaggcatgctcataaggaaaggttaaaaaaagcaaaaggaactcggcaaatcttaccccgcctgtttaccaaaatcatcacctctagcatcaccagcattagaggcaccgcctgcccagtgacacatgtttaacggccgcggtaccctaaccgtgcaaaggtagcataatcacttgttccttaagtagggatcggcttgaatggctccacgagggttcagctgtctcttacttttaaccagtgaaattgacctgcccgtgaagaggcgggcataacacagcaagacgagaagaccctatggagctttaatttattaatgcaaacagtacctaacaaacccacaggtcctaaactaccaaacctgcattaaaaatttcggttggggcgacctcggggcagaacccaacctccgagcagtacatgctaagacttcaccagtcaaagcgaactactatactcaatagatccaataacttgaccaacggaacaagttaccctagggataacagcgcaatcctattctagagtccatatcaacaatagggtttacgacctcgatgttggatcaggacatcccaatggtgcagccgctactaaaggttcgtttgttcaacgattaaagtcctacgtgatctgagttcagaccggagtaatccaggtcggtttctatctacttcaaattcccg

SEQ ID NO: 351 - DNA, 893 bp, Homo sapiens
cgttcactcctgcctgggcaacgaagagtgaaactccatctcaaaacaaacaaacaaacaaacaaacaagcaaaagcactctaggtataaaaggaacttcctctgcctgcaagaccccccatctccttcccatgaagtccttaacttctgttcaacccaaacgcccagcgcgtcccttccactgcgctgcccgatgcacctctgcccgccacgccttcagtgttgtggtcatttgtgcctgcgcacccagggctgcaggtaccttcctccagtgtgcttccaggacgggttattcaggatgctgagacgagccgccagcttcacacagaactggggtgagacctcagcacctgctgcctgtgttcctgaggctgtctgccaaggcgctcaggaaacgcacatgcctcctgagcctcatatgcacacctcgtggacggcagcctgcaggaccactggcaagttttgttgccgaaatccctcttcgaggaaaaaagtcaattgttggcaattagatattaagatcacataactcacttcaatcagtcgtctaaaaacaaacggctgataccactgagtctcaaggaagcagccacaggggcttctgctgagggggcaggcggagcttgaggaaaccgcagataagtttttttctctttgaaagatagagattaatacaactacttaaaaaatatagtcaataggttactaagatattgcttagcgttaagttttaacgtaattttaatagcttaaaattttaagagaaaatatgaagacttagaagagtagcatgaggaaggaaaagataaaaggtttctaaaacatgacggaggttgagatgaagcttcttcatggagtaaaaaatgtatttaaaagaaaattgagagaaagcg

SEQ ID NO: 352 - DNA, 316 bp, Homo sapiens
gtttttagggttctttagtgttgtttctttcacccaggggtggtggtcccagccagtttggtgctgacggtgagaggaaattagaatctgtttgcaaattgtccaacccaccccctcaacatgaggggcttccattttctgtgttttgtaagggaactgtttccttcatgccgccatgttcctgatattagttctgatttctttttaacaaatgttatcatgattaagaaaatttccagcactttaatggccaattaactgagaatgtaagaaaattgatgctgtacaaggcaaataaagctgtttattaaccttg

SEQ ID NO: 353 - DNA, 375 bp, Homo sapiens
gttcaaacagcaaacgcccacagatggcccagaggtggtggtagtcagggtgtgtgggtgtttttagggttctttagtgttgtttctttcacccaggggtggtggtcccagccagtttggtgctgacggtgagaggaaattagaatctgtttgcaaattgtccaacccaccccctcaacatgaggggcttccattttctgtgttttgtaagggaactgtttccttcatgccgccatgttcctgatattagttctgatttctttttaacaaatgttatcatgattaagaaaatttccagcactttaatggccaattaactgagaatgtaagaaaattgatgctgtacaaggcaaataaagctgtttattaaccttg

SEQ ID NO: 354 - DNA, 560 bp, Homo sapiens
  misc_feature (374)..(374): n is a, c, g, or t
  misc_feature (376)..(376): n is a, c, g, or t
  misc_feature (401)..(401): n is a, c, g, or t
  misc_feature (417)..(417): n is a, c, g, or t
  misc_feature (435)..(435): n is a, c, g, or t
  misc_feature (457)..(457): n is a, c, g, or t
  misc_feature (470)..(470): n is a, c, g, or t
  misc_feature (492)..(494): n is a, c, g, or t
  misc_feature (511)..(511): n is a, c, g, or t
  misc_feature (516)..(517): n is a, c, g, or t
  misc_feature (520)..(521): n is a, c, g, or t
  misc_feature (524)..(524): n is a, c, g, or t
  misc_feature (529)..(530): n is a, c, g, or t
  misc_feature (537)..(537): n is a, c, g, or t
  misc_feature (547)..(547): n is a, c, g, or t
  misc_feature (554)..(554): n is a, c, g, or t
  misc_feature (556)..(556): n is a, c, g, or t
atcaactttcgatggtagtcgccgtgcctaccatggtgaccacgggtgacggggaatcagggttcgattccggagagggagcctgagaaacggctaccacatccaaggaaggcagcaggcgcgcaaattacccactcccgacccggggaggtagtgacgaaaaataacaatacaggactctttcgaggccctgtaattggaatgagtccactttaaatcctttaacgaggatccattggagggcaagtctggtgccagcagccgcggtaattccagctccaatagcgtatattaaagttgctgcagttaaaaagctcgtagttggatcttgggagcgggcgggccggtccgccgcgaggcgagccaccgccgtncncgcccttgcctctcggcgccccctngatgctcttagctgantgtcccgcggggcccganccgtttactttgaaaaaatttnagtgttaaagcangcccgaaccgctggatacccgnnntaggaataatggattangaccnnggnnctntttgnnggtttcngactgagccntattaananggac

SEQ ID NO: 355 - DNA, 348 bp, Homo sapiens
aaaacgacggccagtgaattgtaatacgactcactatagggcgaattgggccctctagatgcatgctcgagcggccgccagtgtgatggatatctgcagaattcggcttttgacaccagaccaactggtaatggtagcgactggcgctcagctggaattccggctgggactaccgggtctcactccagaagaggcttcttcagagcatggtagtcttggggttctaagagaatgagagtagaagctgcaaaacctcttgaaactggggcttgggagtcacacatgactttctccacattctgttcgtcaaaagcgaatcataaggacagcacagactcaagggataag

SEQ ID NO: 356 - DNA, 505 bp, Homo sapiens
  misc_feature (457)..(457): n is a, c, g, or t
aaacgacggccagtgaattgtaatacgactcactatagggcgaattgggccctctagatgcatgctcgagcggccgccagtgtgatggatatctgcagaattcggcttttkacaccagaccaactggtaatggtagcgaccggttctcagctggaattccggattggtccaattgggtatgaggagttcagttatatgtttgggattttttaggtagtgggtgttgagcttgaacgctttcttaattggtggctgcttttaggcctactatgggtgttaaattttttactctctctacaaggttttttcctagtgtccaaagagctgttcctctcttggactaacagttaaatttacaaggggatttagagggttctgtggggcaaatttaaagttgaactaagattctatcttggacaaccagctatcaccaggctcggtaggtttgttgcctctncctataaatcttcccactatttttgtacatagacgggtgttctctttt

SEQ ID NO: 357 - DNA, 430 bp, Homo sapiens
  misc_feature (120)..(120): n is a, c, g, or t
  misc_feature (339)..(339): n is a, c, g, or t
  misc_feature (386)..(386): n is a, c, g, or t
gttcagtaattatcttttatttcattttctccccttcccacccctccccctcggatccagcagagggctgtggtggcggcggcgtccaagcgggcgcggacggcgtacacgagcgcgcantggtggagctggagaaggagttccattttaaccgctacctgtgccggcctcgcgttgtagagatggccaacctgctgaacctcagcgagcggcagatcaagatctctcctctcaccacgcgcctcctcctcagggtagaatccaagaagcgcccaaattaacacaccttacatctttgtaggtaattccccccaaatcttgattttttttttcctcaantatcggtttcttccacgaaacctaaactttcacaatcctcttccggngccacaaagaaggtgtcacgtgacccgaaagccaaacaccattg

SEQ ID NO: 358 - DNA, 556 bp, Homo sapiens; identical to SEQ ID NO: 152

SEQ ID NO: 359 - DNA, 2586 bp, Homo sapiens
  misc_feature (2317)..(2317): n is a, c, g, or t
ccattaggcctatgaattataagatacagtcactttaaaatccactggaaggctgaagagtgagttaaacctcttataatgaatatacagtgaaaccagtagaggcattttatttagggttcctacaagaaagtgcttaaatagcatcgacgcctacatgctacatcctgttcagtctctgcctctgtgatgcagttggccagcaaatatcctccaagtcatcatttgcatagtgctagggataaaatgaggagcaataccaaatgctatacctgcccttatgggtcttatagtccaacgggagaaaaagatattatacaaataatcacggaaaataaatagaaaacgcatccttgtttttgtttagtggatcctctatccttcagagactctggaacccctgtggtcttctcttcatctaatgaccctgaggggatggagttttcaagtccttccagagaggaatgtcccaagcctttgagtagggtaagcatcatggctggcagcctcacaggtttgcttctacttcaggcagtgtcgtgggcatcaggtgcccgcccctgcatccctaaaagcttcggctacagctcggtggtgttgtctgcaatgccacatactgtgactcctttgaccccccgacctttcctgcccttggtaccttcagccgctatgagagtacacgcagtgggcgacggatggagctgagtatggggcccatccaggctaatcacacgggcacaggcctgctactgaccctgcagccagaacagaagttccagaaagtgaagggatttggaggggccatgacagatgctgctgctctcaacatccttgccctgtcaccccctgcccaaaatttgctacttaaatcgtacttctctgaagaaggaatcggatataacatcatccgggtacccatggccagctgtgacttctccatccgcacctacacctatgcagacacccctgatgatttccagttgcacaacttcagcctcccagaggaagataccaagctcaagatacccctgattcaccgagccctgcagttggcccagcgtcccgtttcactccttgccagcccctggacatcacccacttggctcaagaccaatggagcggtgaatgggaaggggtcactcaagggacagcccggagacatctaccaccagacctgggccagatactttgtgaagttcctggatgcctatgctgagcacaagttacagttctgggcagtgacagctgaaaatgagccttctgctgggctgttgagtggataccccttccagtgcctgggcttcacccctgaacatcagcgagacttcattgcccgtgacctaggtcctaccctcgccaacagtactcaccacaatgtccgcctactcatgctggatgaccaacgcttgctgctgccccactgggcaaaggtggtactgacagacccagaagcagctaaatatgttcatggcattgctgtacattggtacctggactttctggctccagccaaagccaccctaggggagacacaccgcctgttccccaacaccatgctctttgcctcagaggcctgtgtgggctccaagttctgggagcagagtgtgcggctaggctcctgggatcgagggatgcagtacagccacagcatcatcacgaacctcctgtaccatgtggtcggctggaccgactggaaccttgccctgaaccccgaaggaggacccaattgggtgcgtaactttgtcgacagtcccatcattgtagacatcaccaaggacacgttttacaaacagcccatgttctaccaccttggccacttcagcaagttcattcctgagggctcccagagagtggggctggttgccagtcagaagaacgacctggacgcagtggcactgatgcatcccgatggctctgctgttgtggtcgtgctaaaccgctcctctaaggatgtgcctcttaccatcaaggatcctgctgtgggcttcctggagacaatctcacctggctactccattcacacctacctgtggcatcgccagtgatggagcagatactcaaggaggcactgggctcagcctgggcattaaagggacagagtcagctcacacgctgtctgtgactaaagagggcacagcagggccagtgtgagcttacagcgacgtaagcccaggggcaatggtttgggtgactcactttcccctctaggtggtgcccagggctggaggcccctagaaaaagatcagtaagccccagtgtccccccagcccccatgcttatgtgaacatgcgctgtgtgctgcttgctttggaaactngcctgggtccaggcctagggtgagctcactgtccgtacaaacacaagatcagggctgagggtaaggaaaagaagagactaggaaagctgggcccaaaactggagactgtttgtctttcctagagatgcagaactgggcccgtggagcagcagtgtcagcatcagggcggaagccttaaagcagcagcgggtgtgcccaggcacccagatgattcctatggcaccagccaggaaaaatggcagctcttaaaggagaaaatgtttgagccc

SEQ ID NO: 360 - DNA, 1448 bp, Homo sapiens; identical to SEQ ID NO: 234

SEQ ID NO: 361 - DNA, 2227 bp, Homo sapiens; identical to SEQ ID NO: 109

SEQ ID NO: 362 - DNA, 205 bp, Homo sapiens
ggtaatacttagagcattacaaagcactttcacatttaaatttgattttggaaagtattttctttttgagacagagtctctgtcacccaggctggagtgcatggagtgcagtggtgcaaacacagctcgctgcaccctcaacctcctgggctcaagcagtctttccacctcggcctcccaagttgctaggactataggactacag

SEQ ID NO: 363 - DNA, 354 bp, Homo sapiens
tgagcttgaacgctttcttaattggtggctgcttttaggcctactatgggtgttaaattttttactctctctacaaggttttttcctagtgtccaaagagctgttcctctttggactaacagttaaatttacaaggggatttagagggttctgtgggcaaatttaaagttgaactaagattctatcttggacaaccagctatcaccaggctcggtaggtttgtcgcctctacctataaatcttcccactattttgctacatagacgggtgtgctcttttagctgttcttaggtagctcgtctggtttcgggggtcttagctttggctctccttgcaaagttatttctagttaat

SEQ ID NO: 364 - DNA, 354 bp, Homo sapiens
attaactagaaataactttgcaaggagagccaaagctaagacccccgaaaccagacgagctacctaagaacagctaaaagagcacacccgtctatgtagcaaaatagtgggaagatttataggtagaggcgacaaacctaccgagcctggtgatagctggttgtccaagatagaatcttagttcaactttaaatttgcccacagaaccctctaaatccccttgtaaatttaactgttagtccaaagaggaacagctctttggacactaggaaaaaaccttgtagagagagtaaaaaatttaacacccatagtaggcctaaaagcagccaccaattaagaaagcgttcaagctca

SEQ ID NO: 365 - DNA, 713 bp, Homo sapiens
  misc_feature (536)..(536): n is a, c, g, or t
  misc_feature (551)..(551): n is a, c, g, or t
  misc_feature (598)..(598): n is a, c, g, or t
  misc_feature (661)..(661): n is a, c, g, or t
  misc_feature (686)..(686): n is a, c, g, or t
  misc_feature (699)..(699): n is a, c, g, or t
  misc_feature (707)..(709): n is a, c, g, or t
gccgcctatttcctccgaaacccgcgctgcggagcagcccagtgcatagagttcaacacttccccttgttgtggaaagtaaaggagcctcactaccacctttttttctttgcgttttcttactgctggtcctgggagccttttccttcggagcagcagccctgtccggcatctgtcttgagctcccagcaaggaaagtccatcagcttgataatggaggagaacaatgactccacggagaacccccaacaaggccaagggcggcagaatgccatcaagtgtgggtggctgaggaagcaaggaggctttgtcaagacttggcatactcgctggtttgtgctcaagggggatcagctctattatttcaaagatgaagatgaaaccaagcccttgggtactatttttctgcctggaaataaagtttctgagcatccctgcaatgaagagaacccagggaagttcctttttgaagtagttccaggtaagatattttcctagtctgattaaattattgcatcctgggtggtaaaggtgaanatgggtcaaacaggnttcattcttttttgaatcatgactgagaccttaatttgaggcttggntaatggtgacccaaataatgatgcagggttatttctaatcaaatgaatgcctccccactactntgacacataatataaatttatttgncatgaactcatantgacccannntgag

SEQ ID NO: 366 - DNA, 261 bp, Homo sapiens
  misc_feature (200)..(200): n is a, c, g, or t
  misc_feature (212)..(212): n is a, c, g, or t
  misc_feature (215)..(215): n is a, c, g, or t
  misc_feature (226)..(226): n is a, c, g, or t
  misc_feature (228)..(228): n is a, c, g, or t
  misc_feature (231)..(231): n is a, c, g, or t
  misc_feature (242)..(242): n is a, c, g, or t
  misc_feature (244)..(245): n is a, c, g, or t
  misc_feature (249)..(250): n is a, c, g, or t
  misc_feature (257)..(257): n is a, c, g, or t
  misc_feature (259)..(259): n is a, c, g, or t
gcaaaacctccttgaagatacaattttgtgaggaaatatgtcagtgattccactgggcaaagcattcaacctataaccccttgtcaaatttcacatcacaagagcgctgtaaaatcaaattcatctccaatagtcctgaacaaatactgtatcatgacttgtggtcaactatggagtctcatggacaaatgaaaatctantagttatgtggncanagtatgtgtgngngancgcattcattngnnctannatataancntg

SEQ ID NO: 367 - DNA, 354 bp, Homo sapiens; identical to SEQ ID NO: 363

SEQ ID NO: 368 - DNA, 355 bp, Homo sapiens
attaactagaaataactttgcaaggagagccaaagctaagacccccgaaaccagacgagctacctaagaacagctaaaagagcacacccgtctatgtagcaaaatagtgggaagatttataggtagaggcgacaaacctaccgagcctggtgatagctggttgtccaagatagaatcttagttcaactttaaatttgcccacagaaccctctaaatccccttgtacaatttaactgttagtccaaagaggaacagctctttggacactaggaaaaaaccttgtagagagagtaaaaaatttaacacccatagtaggcctaaaagcagccaccaattaagaaagcgttcaagctca

SEQ ID NO: 369 - DNA, 599 bp, Homo sapiens
  misc_feature (374)..(374): n is a, c, g, or t
  misc_feature (538)..(538): n is a, c, g, or t
  misc_feature (556)..(556): n is a, c, g, or t
gtgtgacttcaccgaagaccagaccgcagagttcaaggaggccttccagctgtttgaccgaacaggtgatggcaagatcctgtacagccagtgtggggatgtgatgagggccctgggccagaaccctaccaacgccgaggtgctcaaggtcctggggaaccccaagagtgatgagatgaatgtgaaggtgctggactttgagcactttctgcccatgctgcagacagtggccaagaacaaggaccagggcacctatgaggattatgtcgaaggacttcgggtgtttgacaaggaaggaaatggcaccgtcatgggtgctgaaatccggcatgttcttgtcacactgggtgagaagatgacagaggaagaagtanagatgctggtggcagggcatgaggacagcaatggttgtatcaactatgaagagctcgtccgcatggtgctgaatggctgaggaccttcccagtctcccaaatccgtgcctttccctgtgtgaattttgtatctacctaaaagtttccctagcttttttgttcancactttccatttgttttnttgatgatgttgccgcacattcaccaataacttgtttttggcc

SEQ ID NO: 370 - DNA, 545 bp, Homo sapiens
  misc_feature (479)..(479): n is a, c, g, or t
  misc_feature (532)..(532): n is a, c, g, or t
ggcccagagagcaagtttatttggtgaatgctgacggcaaacatcatccaagagagacaagatgggaaagttgctgagacaagaaagcctagggaaactttaggctagatacaaaattcacacagggaaaggcacggactctggggagactgggaaggtcctcagccattcagcaccatgcggacgagctcttcatagttgatacaaccattgctgtcctcatgccctgccaccagcatctctacttcttcctctgtcatcttctcacccagtgtgacaagaacatgccggatttcagcacccatgacggtgccatttccttccttgtcaaacacccgaagtccttcgacataatcctcataggtgccctggtccttgttcttggccactgtctgcagcatgggcagaaagtgctcaaagtccagcaccttcacattcatctcatcactcttggggttccccaggaccttgagcacctnggcgttggtagggttctggcccaaggccctcatcacatccccacactggctgncaggatcttgcat

SEQ ID NO: 371 - DNA, 387 bp, Homo sapiens
  misc_feature (358)..(358): n is a, c, g, or t
ttcagtttcctctcctagtagtacacgagtctccattgtttcacatcctcaccagtgctttgtattgtctgacttttaagattctgctcatcagacatatgtaaatgacacataacacagtttgttttcacagaacaaatggttatttaaattctaaacccaaagtaatgtacaattacaataaaaggccagaagaaagaggaggaaggaaaaagatgtgagaaataaaattgttatagtaattcttgttttcgcttccaagcataaaatagtaattggaatgtttagtgtgcatgtgtgtatacaatgcaatatgatacaatataaaagcaatgcctctctttgttccattggttgntttttaaatctatttttataagtaataag

SEQ ID NO: 372 - DNA, 178 bp, Homo sapiens
ctggaatctagatagttttcaggatggggaagatagattcaaaaccacctaagggcattctgggtacaaagcattgtgcaaggctttggtgatacagagaataaggtcttttttcccatacttcctcatctgccaaggttatctccaattgtacctttctctccagttccaagcttgc

SEQ ID NO: 373 - DNA, 387 bp, Homo sapiens
cggtaaattttttactctctctacaaggttttttcctagtgtccaaagagctgttcctctttggactaacagttaaatttacaaggggatttagagggttctgtgggcaaatttaaagttgaactaagattctatcttggacaaccagctatcaccaggctcggtaggtttgtcgcctctacctataaatcttcccactattttgctacatagacgggtgtgctcttttagctgttcttaggtagctcgtctggtttcgggggtcttagctttggctctccttgcaaagttatttctagttaattcattatgcagaaggtataggggttagtccttgctatattatgcttggttataatttttcatctttcccttgccgaaattccg

SEQ ID NO: 374 - DNA, 420 bp, Homo sapiens
gtcagaaaaccacacatgcagacccagagagaatggtttctttgtggtttgcacaggaaaaaccatccttactaaaagacagggtagagtggggagggtgcaggaaggaactcataatgaccattttcccacatggagaagcaaagcagcttcttcagggctcaatcagttatgaaaaagaatctcaccccattagatagcactcctgagctcagtgtagggtcccaagcccaccaaccaaggctgtctccccagaacaaatcaggaaggctccagtggtcagatagaaagtgacaaacaaaacatgagtgcatctagccacatcctcacattccacacaagagaacccatgtgactaaacaggaatcccctgctgccccagttctaaaaaggaactactgactgccagtgcaatttctt

SEQ ID NO: 375 - DNA, 402 bp, Homo sapiens
  misc_feature (305)..(305): n is a, c, g, or t
  misc_feature (353)..(353): n is a, c, g, or t
  misc_feature (368)..(368): n is a, c, g, or t
  misc_feature (391)..(391): n is a, c, g, or t
caaggaaattgcactgtgcagtcagtagttcctttttagaactgggtgcagcaggggattcctgtttagtcacatgggttctcttgtgtggaatgtgaggatgtggctagatgcactcatgttttgtttgtcactttctatctgaccactggagccttcctgatttgttctggggagacagccttggttggtgggcttgggaccctacactgagctcaggagtgctatctaatggggtgagattctttttcataactgattgagccctgaagaagctgctttgcttctccatgtgggaaaatggncattatgagttcctttctgcaccctccccactctaccctgtcttttantaaggatgggttttnctgtgcaaaccacaaagaaaccnttctctctggg

SEQ ID NO: 376 - DNA, 145 bp, Homo sapiens
  misc_feature (32)..(32): n is a, c, g, or t
  misc_feature (53)..(53): n is a, c, g, or t
  misc_feature (55)..(55): n is a, c, g, or t
  misc_feature (61)..(61): n is a, c, g, or t
  misc_feature (77)..(77): n is a, c, g, or t
  misc_feature (101)..(101): n is a, c, g, or t
tgcagctcgccttgcacaacaggaaaaacaanaacaagttaaaattgagtctntngccaanagcttaaaaaatgctntgaggcaaactgcaagtgtcactntgcaggctattgcagctcaaaatgctgcggtccaggctgtcaat

SEQ ID NO: 377 - DNA, 148 bp, Homo sapiens
gcattgacagcctggaccgcagcattctgagctgcaatagcctgcagagtgacacttgcagtttgcctcagagcatcttctaagctcttggctagagactcaattttaacttgttcttgtttttcctgttgtgcaaggcgagctgcat

SEQ ID NO: 378 - DNA, 642 bp, Homo sapiens
  misc_feature (365)..(365): n is a, c, g, or t
  misc_feature (372)..(372): n is a, c, g, or t
  misc_feature (523)..(523): n is a, c, g, or t
  misc_feature (533)..(533): n is a, c, g, or t
  misc_feature (538)..(538): n is a, c, g, or t
  misc_feature (543)..(543): n is a, c, g, or t
  misc_feature (559)..(560): n is a, c, g, or t
  misc_feature (571)..(571): n is a, c, g, or t
  misc_feature (588)..(588): n is a, c, g, or t
  misc_feature (590)..(590): n is a, c, g, or t
  misc_feature (593)..(593): n is a, c, g, or t
  misc_feature (596)..(596): n is a, c, g, or t
  misc_feature (605)..(605): n is a, c, g, or t
  misc_feature (614)..(614): n is a, c, g, or t
  misc_feature (629)..(629): n is a, c, g, or t
  misc_feature (639)..(639): n is a, c, g, or t
gctggaacagaatagcctggaacaggatctttcgttccataatattttttaattagagcaagtcctgctactgtatctgttcctttgaagttaaccaagtgagcagatgctcctatgccagcagtctcttgggaagagactcctctgtagccaaaatcatgtaacttgtattccagaccatctaagttaccagaagtttctaacaaatatttggccaatattttcttctgctctctagaatttgtggccactgtgattggataccaggactgaacaagaatagtctcaatccaatttgtaagccagtaacactctggatctgtgttttccaccgtgaagaaacatttcctctgggaatgacaaanccctcangaacagcttttatttctattggaagatgcccatcatacttctcaagaatggagttcctcccttttcattaaagacatcatcttggaaatgttctttgtagacatctttggcttcctggatttctctttgggtactactttaccttttaagnacttattaanaaagnactgnacccataaaaactggnnctcatatttancttccttaattggaggntntgnttnttttacggnttcaaagangaaaaaatttcttgngtgggggganttg

SEQ ID NO: 379 - DNA, 540 bp, Homo sapiens
  misc_feature (428)..(428): n is a, c, g, or t
  misc_feature (443)..(444): n is a, c, g, or t
  misc_feature (464)..(464): n is a, c, g, or t
  misc_feature (471)..(471): n is a, c, g, or t
  misc_feature (477)..(477): n is a, c, g, or t
  misc_feature (496)..(496): n is a, c, g, or t
  misc_feature (507)..(507): n is a, c, g, or t
  misc_feature (509)..(510): n is a, c, g, or t
gccgcgccagggagctcgcggcgcgcggcccctgtcctccggcccgagatgaatcctgcggcagaagccgagttcaacatcctcctggccaccgactcctacaaggttactcactataaacaatatccacccaacacaagcaaagtttattcctactttgaatgccgtgaaaagaagacagaaaactccaaattaaggaaggtgaaatatgaggaaacagtattttatgggttgcagtacattcttaataagtacttaaaaggtaaagtagtaaccaaagagaaaatccaggaagccaaagatgtctacaaagaacatttccaagatgatgtctttaatgaaaagggatggaactacattcttgagaagtatgatgggcatcttccaataaaaataaaaactgttcctgagggctttgtcatttccanaggaaatgtttcttnncgggggaaaacacagatccnaaggggnactggnttacaaattggattgagantattcttggtnanncctgggatccaatccaagggggcccaaatt

SEQ ID NO: 380 - DNA, 460 bp, Homo sapiens
  misc_feature (304)..(304): n is a, c, g, or t
  misc_feature (344)..(344): n is a, c, g, or t
  misc_feature (371)..(371): n is a, c, g, or t
  misc_feature (411)..(411): n is a, c, g, or t
  misc_feature (418)..(418): n is a, c, g, or t
  misc_feature (432)..(432): n is a, c, g, or t
  misc_feature (434)..(434): n is a, c, g, or t
  misc_feature (441)..(441): n is a, c, g, or t
  misc_feature (446)..(446): n is a, c, g, or t
  misc_feature (448)..(448): n is a, c, g, or t
  misc_feature (454)..(454): n is a, c, g, or t
cacgagcgcacgtgttaggacccgaaagatggtgaactatgcctgggcagggcgaagccagaggaaactctggtggaggtccgtagcggtcctgacgtgcaaatcggtcgtccgacctgggtataggggcgaaagactaatcgaaccatctagtagctggttccctccgaagtttccctcaggatagctggcgctctcgcagacccgacgcacccccgccacgcagttttatccggtaaagcgaatgattagaggtcttggggccgaaacgatctcaacctattctcaaactttaaatggtaanaagcccggctcgcttggcgtggagccgggcgtggaatgcnagtgcctaatgggccacttttggtaancaaaactggcgctgcgggatgaacccaacgcccggttaangggcccnatgccgacctcatnanaccccanaaaangngttggntgatac

SEQ ID NO: 381 - DNA, 500 bp, Homo sapiens
  misc_feature (311)..(311): n is a, c, g, or t
  misc_feature (368)..(368): n is a, c, g, or t
  misc_feature (391)..(391): n is a, c, g, or t
  misc_feature (399)..(399): n is a, c, g, or t
  misc_feature (403)..(403): n is a, c, g, or t
  misc_feature (406)..(406): n is a, c, g, or t
  misc_feature (421)..(421): n is a, c, g, or t
  misc_feature (423)..(423): n is a, c, g, or t
  misc_feature (429)..(429): n is a, c, g, or t
  misc_feature (436)..(436): n is a, c, g, or t
  misc_feature (444)..(444): n is a, c, g, or t
  misc_feature (462)..(462): n is a, c, g, or t
  misc_feature (467)..(467): n is a, c, g, or t
  misc_feature (472)..(472): n is a, c, g, or t
  misc_feature (479)..(479): n is a, c, g, or t
  misc_feature (484)..(487): n is a, c, g, or t
tatcaaccaacaccttttctggggtctgatgagcgtcggcatcgggcgccttaacccggcgttcggttcatcccgcagcgccagttctgcttaccaaaagtggcccactaggcactcgcattccacgcccggctccacgccagcgagccgggcttcttacccatttaaagtttgagaataggttgagatcgtttcggccccaagacctctaatcattcgctttaccggataaaactgcgtggcgggggtgcgtcgggtctgcgagagcgccagctatcctgagggaaacttcggagggaaccagctactanatggttcgattaagtctttcgcccctatacccaggtcggacgaccgatttgcacgtnaggaccgctacggacctccccanagttcctntggnttngccctgccaggctantnaccatntttgggnctaaacgngcgctcggccggaattcnccganctgangggtccngaatnnnncccccatcccagc

SEQ ID NO: 382 - DNA, 266 bp, Homo sapiens
gcccccgctaaccggctttttgcccaaacgggccattatcgaagaattcacaaaaaacaatagcctcatcatccccacatcatagccaccatcaccctccttaacctctacttctacctacgcctaatctactccacctcaatcacactactccccatatctaacaacgtaaaaataaaatgacagtttgaacatacaaaacccaccccattcctccccacactcatcgcccttaccacgctactcctacctatctccccttttat

SEQ ID NO: 383 - DNA, 268 bp, Homo sapiens
  misc_feature (210)..(210): n is a, c, g, or t
  misc_feature (223)..(223): n is a, c, g, or t
  misc_feature (226)..(227): n is a, c, g, or t
  misc_feature (256)..(256): n is a, c, g, or t
  misc_feature (259)..(259): n is a, c, g, or t
ataaaaggggagataggtaggagtagcgtggtaagggcgatgagtgtggggaggaatggggtgggttttgtatgttcaaactgtcattttatttttacgttgttagatatggggagtagtgtgattgaggtggagtagattaggcgtaggtagaagtagaggttaaggagggtgatggtggctatgatgtggggatgatgaggctattgntttttgtgaattnttnnataatggcccgtttgggcaaaaagccggntancgggggccg

SEQ ID NO: 384 - DNA, 427 bp, Homo sapiens
  misc_feature (68)..(68): n is a, c, g, or t
  misc_feature (360)..(360): n is a, c, g, or t
cgggactttaccgcatcatttgcagaaccagtatcaatattcgtaaggtaactgctcttaaaactcanaatcatcctaactggatgtaaaaactttttcccagaaaatgttggggtgcactcacaaaaccctcttacttcattttctccatataatgactctatggggggagggggccaggtgtgctcattctcatttgaaatttgaattccaatcttgttagaatgtagcccaactcctttcctttctcaggaaagtggcgacagttctcaggtctgcctccacattaccatcacctgggggatctaaaactactcaggcctgggttccaccttcagccaacgaaatctgaatctttangggtggctgatttcgctgttctgtaaatgaagttttaatggtcacagcccgtctgaccgtttgcata

SEQ ID NO: 385 - DNA, 757 bp, Homo sapiens
  misc_feature (326)..(326): n is a, c, g, or t
  misc_feature (374)..(374): n is a, c, g, or t
  misc_feature (377)..(377): n is a, c, g, or t
  misc_feature (408)..(408): n is a, c, g, or t
  misc_feature (411)..(411): n is a, c, g, or t
  misc_feature (432)..(432): n is a, c, g, or t
  misc_feature (447)..(447): n is a, c, g, or t
  misc_feature (464)..(464): n is a, c, g, or t
  misc_feature (468)..(468): n is a, c, g, or t
  misc_feature (470)..(470): n is a, c, g, or t
  misc_feature (476)..(476): n is a, c, g, or t
  misc_feature (489)..(489): n is a, c, g, or t
  misc_feature (508)..(508): n is a, c, g, or t
  misc_feature (518)..(518): n is a, c, g, or t
  misc_feature (528)..(528): n is a, c, g, or t
  misc_feature (544)..(544): n is a, c, g, or t
  misc_feature (554)..(554): n is a, c, g, or t
  misc_feature (565)..(566): n is a, c, g, or t
  misc_feature (570)..(570): n is a, c, g, or t
  misc_feature (578)..(578): n is a, c, g, or t
  misc_feature (580)..(581): n is a, c, g, or t
  misc_feature (584)..(584): n is a, c, g, or t
  misc_feature (587)..(587): n is a, c, g, or t
  misc_feature (589)..(589): n is a, c, g, or t
  misc_feature (596)..(597): n is a, c, g, or t
  misc_feature (599)..(599): n is a, c, g, or t
  misc_feature (605)..(610): n is a, c, g, or t
  misc_feature (613)..(613): n is a, c, g, or t
  misc_feature (637)..(637): n is a, c, g, or t
  misc_feature (639)..(640): n is a, c, g, or t
  misc_feature (644)..(648): n is a, c, g, or t
  misc_feature (650)..(651): n is a, c, g, or t
  misc_feature (666)..(666): n is a, c, g, or t
  misc_feature (668)..(668): n is a, c, g, or t
  misc_feature (670)..(671): n is a, c, g, or t
  misc_feature (681)..(683): n is a, c, g, or t
  misc_feature (687)..(687): n is a, c, g, or t
  misc_feature (689)..(689): n is a, c, g, or t
  misc_feature (692)..(692): n is a, c, g, or t
  misc_feature (696)..(696): n is a, c, g, or t
  misc_feature (698)..(698): n is a, c, g, or t
  misc_feature (700)..(700): n is a, c, g, or t
  misc_feature (702)..(703): n is a, c, g, or t
  misc_feature (705)..(706): n is a, c, g, or t
  misc_feature (710)..(711): n is a, c, g, or t
  misc_feature (717)..(717): n is a, c, g, or t
  misc_feature (720)..(721): n is a, c, g, or t
  misc_feature (726)..(726): n is a, c, g, or t
  misc_feature (728)..(730): n is a, c, g, or t
  misc_feature (732)..(733): n is a, c, g, or t
  misc_feature (735)..(735): n is a, c, g, or t
  misc_feature (739)..(739): n is a, c, g, or t
  misc_feature (741)..(741): n is a, c, g, or t
  misc_feature (754)..(754): n is a, c, g, or t
tatgcaaacggtcagacgtggctgtgaccattaaaacttcatttacagaacagcgatatcagccacccctaaagattcagatttcgttggctgaaggtggaacccaggcctgagtagttttagatccccaggtgatggtaatgtggaggcagacctgagaactgtcggccactttcctgagaaaggaaaggagttgggctacattctaacaagattggaattcaaatttcaaatgagaatgagcacacctggccccctccccccatagagtcattatatggagaaaatgaagtaagagggttttgtgagtgcaccccaacattttntgggaaaaaggttttacatccagttaggatgattctgagttttaagancanttaccttaccaatattgatactgggtctgcnaangatgcgggaaaatcccccggnattcactgagcgccnggcggtaccattacaantggntngggggnaaaaataataatnaccggcaggcatgttaagnccaaattttngaaattcttncactggggggcggttnacttcttttnaagggccaatnncccntatgaggngnntanaantnctggccnngntttcannnnnnacnggaaaactggggttcccaattaantnntttnnnnnanncccttttccctgggnanannaaaaaggccnnnccantnccnttcnanantnncnnctanngggaanggnnccccntnnngnncntaancngggggggggggtnccc

SEQ ID NO: 386 - DNA, 285 bp, Homo sapiens
caacaacacatcatcagtagggtaaaactaacctgtctcacgacggtctaaacccagctcacgttccctattagtgggtgaacaatccaacgcttggtgaattctgcttcacaatgataggaagagccgacatcgaaggatcaaaaagccgacgtcgctatgaacgcttggccgccacaagccagttatcccttgtggtaacttttctgacacctcctgcttaaaacccaaaaggtcagaaggatcgtgaggccccgctttcatgggcagtaggcagattcgtcc

SEQ ID NO: 387 - DNA, 283 bp, Homo sapiens
ggacgaatctgcctactgcccatgaaagcggggcctcacgatccttctgaccttttgggttttaagcaggaggtgtcagaaaagttaccacagggataactggcttgtggcggccaagcgttcatagcgacgtcgctttttgatccttcgatgtcggctcttcctatcattgtgaagcagaattcaccaagcgttggattgttcacccactaatagggaacgtgagctgggtttagaccgtcgtgagacaggttagttttaccctactgatgatgtgttgttg

SEQ ID NO: 388 - DNA, 765 bp, Homo sapiens
  misc_feature (183)..(183): n is a, c, g, or t
  misc_feature (486)..(486): n is a, c, g, or t
  misc_feature (515)..(515): n is a, c, g, or t
  misc_feature (524)..(524): n is a, c, g, or t
  misc_feature (537)..(537): n is a, c, g, or t
  misc_feature (564)..(564): n is a, c, g, or t
  misc_feature (571)..(571): n is a, c, g, or t
  misc_feature (582)..(582): n is a, c, g, or t
  misc_feature (584)..(584): n is a, c, g, or t
  misc_feature (598)..(598): n is a, c, g, or t
  misc_feature (626)..(626): n is a, c, g, or t
  misc_feature (636)..(637): n is a, c, g, or t
  misc_feature (641)..(641): n is a, c, g, or t
  misc_feature (647)..(647): n is a, c, g, or t
  misc_feature (651)..(651): n is a, c, g, or t
  misc_feature (653)..(653): n is a, c, g, or t
  misc_feature (656)..(656): n is a, c, g, or t
  misc_feature (663)..(664): n is a, c, g, or t
  misc_feature (674)..(674): n is a, c, g, or t
  misc_feature (677)..(677): n is a, c, g, or t
  misc_feature (679)..(679): n is a, c, g, or t
  misc_feature (682)..(683): n is a, c, g, or t
  misc_feature (685)..(687): n is a, c, g, or t
  misc_feature (697)..(697): n is a, c, g, or t
  misc_feature (710)..(710): n is a, c, g, or t
  misc_feature (714)..(714): n is a, c, g, or t
  misc_feature (718)..(718): n is a, c, g, or t
  misc_feature (733)..(733): n is a, c, g, or t
  misc_feature (735)..(735): n is a, c, g, or t
  misc_feature (737)..(737): n is a, c, g, or t
  misc_feature (739)..(739): n is a, c, g, or t
  misc_feature (746)..(746): n is a, c, g, or t
  misc_feature (748)..(748): n is a, c, g, or t
  misc_feature (750)..(750): n is a, c, g, or t
  misc_feature (756)..(756): n is a, c, g, or t
  misc_feature (758)..(759): n is a, c, g, or t
  misc_feature (762)..(762): n is a, c, g, or t
ttttttttttttttttgagacagagtctcactctgtcacccaggctggggtgcaatggcatgctctcagctcactgcaacctctgcctcctgggttcaagcgattctcctgcctcaacctcccgagtgactgggattacaggcatgcaccaccatacccagctaatttttgtatttttagtanagatggggtttcaccatgttggtgaggctgatcttaaactcctgacctcaggtgatctgcctgccttggcttcccaaagcactgggattacaggtgtgagccaccatgcctggcctattttgaaaaaaatttgaagtcaaaataatagtacaataaatacctgtgaacccttcagctatatttaccaattgttaatattttaccatgtttgcttcatctctctacatatgtattcatatgtaattttttttatttttgccaaaacatttgaaaattaaacatctggatactttgccattaaanccttcaacatgaatctcctaaaaaataanaacagcttntatccccataccnttatcacatcccagaaaattacccccntacattnaatgactactncngccctatcaaattntttgatatccaaactttctttggggggnttttttcccnncccnaatcantcangnccnccattgnntttaatgggnagntnctnnannnaaaatatccnccttttttctttntganttgncttttaaaaaaccantnanancctgggngntnccaacngnnttntgg

SEQ ID NO: 389 - DNA, 584 bp, Homo sapiens
  misc_feature (129)..(129): n is a, c, g, or t
  misc_feature (226)..(226): n is a, c, g, or t
  misc_feature (244)..(244): n is a, c, g, or t
  misc_feature (273)..(273): n is a, c, g, or t
  misc_feature (363)..(363): n is a, c, g, or t
  misc_feature (400)..(400): n is a, c, g, or t
  misc_feature (419)..(419): n is a, c, g, or t
  misc_feature (430)..(430): n is a, c, g, or t
  misc_feature (435)..(435): n is a, c, g, or t
  misc_feature (455)..(455): n is a, c, g, or t
  misc_feature (458)..(458): n is a, c, g, or t
  misc_feature (463)..(463): n is a, c, g, or t
  misc_feature (482)..(483): n is a, c, g, or t
  misc_feature (485)..(487): n is a, c, g, or t
  misc_feature (490)..(491): n is a, c, g, or t
  misc_feature (493)..(493): n is a, c, g, or t
  misc_feature (507)..(508): n is a, c, g, or t
  misc_feature (512)..(512): n is a, c, g, or t
  misc_feature (515)..(515): n is a, c, g, or t
  misc_feature (517)..(517): n is a, c, g, or t
  misc_feature (519)..(520): n is a, c, g, or t
  misc_feature (526)..(526): n is a, c, g, or t
  misc_feature (533)..(533): n is a, c, g, or t
  misc_feature (535)..(536): n is a, c, g, or t
  misc_feature (538)..(538): n is a, c, g, or t
  misc_feature (541)..(541): n is a, c, g, or t
  misc_feature (544)..(545): n is a, c, g, or t
  misc_feature (547)..(547): n is a, c, g, or t
  misc_feature (549)..(549): n is a, c, g, or t
  misc_feature (552)..(552): n is a, c, g, or t
  misc_feature (557)..(557): n is a, c, g, or t
  misc_feature (562)..(563): n is a, c, g, or t
  misc_feature (565)..(565): n is a, c, g, or t
  misc_feature (578)..(578): n is a, c, g, or t
  misc_feature (580)..(580): n is a, c, g, or t
cggctttgtggaagacagtttttccgtgaacaggggttggaggtggtggtgggagggatggttttgggatgaaactgttccacctcagatcattaggtattagattctcataaagagcacacagcctanatccctcacatgtgcagttcctatgagaatctaatgccacagttcacccgccactcaccgctgtgagtggccttgttcctaacagaccatggaccantactggcccgtggcccangggttagggacccctgatctaacacatanatctaatgaagaaacaggttccatgtgttaaaaatctgtggttgaaactgacattatattcctcctgatttgataccatggggaatacanaacatgacctatgtggtactcctaccaaaaacgtttnacttgaatctaaccatgancaaacatccanacaantacagcttgtgagagcctcncangctgntacttggattttttaaaanngnnntgnntnaaaggaaaaaaggnngggntantntnnattaangaacttncnntnaangcnngngnggncttgntgaanntngatgggaaaaaancncccc

SEQ ID NO: 390 - DNA, 439 bp, Homo sapiens
  misc_feature (247)..(247): n is a, c, g, or t
  misc_feature (262)..(262): n is a, c, g, or t
  misc_feature (268)..(268): n is a, c, g, or t
  misc_feature (279)..(279): n is a, c, g, or t
  misc_feature (284)..(284): n is a, c, g, or t
  misc_feature (286)..(286): n is a, c, g, or t
  misc_feature (291)..(291): n is a, c, g, or t
  misc_feature (293)..(293): n is a, c, g, or t
  misc_feature (310)..(310): n is a, c, g, or t
  misc_feature (312)..(312): n is a, c, g, or t
  misc_feature (317)..(317): n is a, c, g, or t
  misc_feature (327)..(327): n is a, c, g, or t
  misc_feature (329)..(329): n is a, c, g, or t
  misc_feature (336)..(337): n is a, c, g, or t
  misc_feature (348)..(348): n is a, c, g, or t
  misc_feature (351)..(351): n is a, c, g, or t
  misc_feature (355)..(355): n is a, c, g, or t
  misc_feature (357)..(357): n is a, c, g, or t
  misc_feature (359)..(360): n is a, c, g, or t
  misc_feature (362)..(365): n is a, c, g, or t
  misc_feature (367)..(369): n is a, c, g, or t
  misc_feature (371)..(372): n is a, c, g, or t
  misc_feature (374)..(374): n is a, c, g, or t
  misc_feature (381)..(382): n is a, c, g, or t
  misc_feature (384)..(384): n is a, c, g, or t
  misc_feature (393)..(393): n is a, c, g, or t
  misc_feature (398)..(398): n is a, c, g, or t
  misc_feature (404)..(404): n is a, c, g, or t
  misc_feature (411)..(411): n is a, c, g, or t
  misc_feature (415)..(415): n is a, c, g, or t
  misc_feature (417)..(417): n is a, c, g, or t
  misc_feature (426)..(426): n is a, c, g, or t
  misc_feature (428)..(430): n is a, c, g, or t
agcacactggcggccgttactagtggatccgagctcggtaccaagcttgatgcatagcttgagtattctatagtgtcacctaaatagcttggcgtaatcatggtcatagctgtttcctgtgtgaaattgttatccgctcacaattccacacaacatacgagccggaagcataaagtgtaaagcctggggtgcctaatgagtgagctaactcacattaattgcgttgcgctcactgcccgctttccantcgggaaacctgtcntgccanctgcattaatnaatcngncaacncncggggagaggcggtttncntattnggcgctcttncncttctcnntcactgactcntgnctcngncnntnnnntnnngnnancggatanntnacttcaaangcggnatacgntatccanaatnangggataacncnnnaaaaaacat

SEQ ID NO: 391 - DNA, 335 bp, Homo sapiens
  misc_feature (247)..(247): n is a, c, g, or t
  misc_feature (262)..(262): n is a, c, g, or t
  misc_feature (268)..(268): n is a, c, g, or t
  misc_feature (279)..(279): n is a, c, g, or t
  misc_feature (284)..(284): n is a, c, g, or t
  misc_feature (286)..(286): n is a, c, g, or t
  misc_feature (291)..(291): n is a, c, g, or t
  misc_feature (293)..(293): n is a, c, g, or t
  misc_feature (310)..(310): n is a, c, g, or t
  misc_feature (312)..(312): n is a, c, g, or t
  misc_feature (317)..(317): n is a, c, g, or t
  misc_feature (327)..(327): n is a, c, g, or t
  misc_feature (329)..(329): n is a, c, g, or t
agcacactggcggccgttactagtggatccgagctcggtaccaagcttgatgcatagcttgagtattctatagtgtcacctaaatagcttggcgtaatcatggtcatagctgtttcctgtgtgaaattgttatccgctcacaattccacacaacatacgagccggaagcataaagtgtaaagcctggggtgcctaatgagtgagctaactcacattaattgcgttgcgctcactgcccgctttccantcgggaaacctgtcntgccanctgcattaatnaatcngncaacncncggggagaggcggtttncntattnggcgctcttncncttctc

SEQ ID NO: 392 - DNA, 768 bp, Homo sapiens
  misc_feature (368)..(368): n is a, c, g, or t
  misc_feature (376)..(376): n is a, c, g, or t
  misc_feature (388)..(388): n is a, c, g, or t
  misc_feature (436)..(436): n is a, c, g, or t
  misc_feature (479)..(479): n is a, c, g, or t
  misc_feature (484)..(484): n is a, c, g, or t
  misc_feature (486)..(486): n is a, c, g, or t
  misc_feature (498)..(498): n is a, c, g, or t
  misc_feature (517)..(517): n is a, c, g, or t
  misc_feature (554)..(554): n is a, c, g, or t
  misc_feature (562)..(562): n is a, c, g, or t
  misc_feature (569)..(569): n is a, c, g, or t
  misc_feature (583)..(583): n is a, c, g, or t
  misc_feature (598)..(598): n is a, c, g, or t
  misc_feature (607)..(607): n is a, c, g, or t
  misc_feature (610)..(610): n is a, c, g, or t
  misc_feature (619)..(619): n is a, c, g, or t
  misc_feature (625)..(625): n is a, c, g, or t
  misc_feature (643)..(643): n is a, c, g, or t
  misc_feature (645)..(645): n is a, c, g, or t
  misc_feature (648)..(648): n is a, c, g, or t
  misc_feature (655)..(655): n is a, c, g, or t
  misc_feature (660)..(660): n is a, c, g, or t
  misc_feature (672)..(673): n is a, c, g, or t
  misc_feature (681)..(681): n is a, c, g, or t
  misc_feature (694)..(695): n is a, c, g, or t
  misc_feature (700)..(700): n is a, c, g, or t
  misc_feature (707)..(707): n is a, c, g, or t
  misc_feature (713)..(713): n is a, c, g, or t
  misc_feature (719)..(720): n is a, c, g, or t
  misc_feature (722)..(722): n is a, c, g, or t
  misc_feature (725)..(725): n is a, c, g, or t
  misc_feature (732)..(735): n is a, c, g, or t
  misc_feature (737)..(737): n is a, c, g, or t
  misc_feature (740)..(741): n is a, c, g, or t
  misc_feature (743)..(743): n is a, c, g, or t
  misc_feature (750)..(750): n is a, c, g, or t
  misc_feature (753)..(754): n is a, c, g, or t
  misc_feature (757)..(757): n is a, c, g, or t
  misc_feature (762)..(762): n is a, c, g, or t
ctaaacttagggcaaccccaagcgcttgaacctataccaccccactttcctgagctctgtaaagagcatgaagttttcccactgaccccatacactgaggtgccatcacactgcacatttccttccggagaacaagcacgtactcaggtggagatagaactgtctttttacttaatagaaaatgatgtggcagctttaagaggagcgcgtcggtctggggctggtggcttgggtcacgtgacaccggtggtctcgtttgcgcctcttgatgtcgcggcggcgccctgaggacggattgggcaaggctggtccctgtgtgatgagacatcaccctcccaggagcaaggcggaagtctggaggaccttangggcggangcgggagaagcnaactccgatgaatggtctcggcaggctcttcgggaaagggtgagccanggtgggactggccagccaggaagcctgctggtgcaggggaaanaaganancccgcgagattnggccggacccttcccggcnggggaagaaaatcaggagaacaggctgactggaaaancccgcggnccatggnggacaagggtattnccggggccaaaaggncaccatgtnggnggaattccnctgacnccggcgttacattaacantnggntgggggnaaaanaaaataaccggnnggcctgtnagccaaattcacnnctggngggcgtntttggntccacnngnccnacttgannnnanttnngnttttttnggnnccnaaaantgggga

SEQ ID NO: 393 - DNA, 498 bp, Homo sapiens
  misc_feature (364)..(364): n is a, c, g, or t
  misc_feature (366)..(366): n is a, c, g, or t
  misc_feature (396)..(396): n is a, c, g, or t
  misc_feature (401)..(401): n is a, c, g, or t
  misc_feature (407)..(407): n is a, c, g, or t
  misc_feature (443)..(443): n is a, c, g, or t
  misc_feature (450)..(450): n is a, c, g, or t
  misc_feature (455)..(455): n is a, c, g, or t
  misc_feature (457)..(457): n is a, c, g, or t
  misc_feature (470)..(470): n is a, c, g, or t
  misc_feature (474)..(474): n is a, c, g, or t
  misc_feature (483)..(483): n is a, c, g, or t
ccgacatggtgtgccttttggcaccggcgatgagccttgctccgccatcggccgccggggttttccagtcagcctgtctcctgattctcttcccctgcccggcgcagcggtccggccgaatctcgccggggtctcctcttcccctgcaccagccagcgcctcctggctggccagtcccaccctggctcacccttcccgaagagcctgccgagaccactcatcgcgagctcgcctctcccgcctccgcccctcagcgtcctccagacttccgccttgctcctgggagggtgatgtctcatcacacagggaccagccttgcccaatccgtcctcagggcgccgccggacatcaagaggcgcaaacnanacaccggtgtcacgtgaaccaagccaccancccanaacgancgcttctcttaaagctggcccattatttttattaantaaaaanacagntntattttcactgantacntgcttgttntccgaaggaaagggc

SEQ ID NO: 394 - DNA, 428 bp, Homo sapiens
gatggcttatataaccagaagccaaatatttgtgttccaaaaattattttacttagaacaattcatttagattcacttcaatgtgaagtatgtgaaaagcttaattgctgaccagagtgaattttccaacaataagaaatgcatggctgattggctcaaatgattctattcttcagcccttactgaagtacttagtgcataccacctatgtaattttattccccccttatagagatggggtttcaccatgctgcccaggcgggtctcaaactcctaggtacaagtgatccacccacttcggcccgccaaagggccgggattactggcatgagccaccaagcccagcctggttatgtatttattcggtatcataggggctacagcacaaatcaaaaccatagtatcagtgacctccaatctaattcccg

SEQ ID NO: 395 - DNA, 426 bp, Homo sapiens
  misc_feature (413)..(413): n is a, c, g, or t
  misc_feature (421)..(421): n is a, c, g, or t
ggaattagattggaggtcactgatactatggttttgatttgtgctgtagcccctatgataccgaataaatacataaccaggctgggcttggtggctcatgccagtaatcccggccctttggcgggccgaagtgggtggatcacttgtacctaggagtttgagacccgcctgggcagcatggtgaaaccccatctctataaggggggaataaaattacataggtggtatgcactaagtacttcagtaagggctgaagaatagaatcatttgagccaatcagccatgcatttcttattgttggaaaattcactctggtcagcaattaagcttttcacatacttcacattgaagtgaatctaaatgaattgttctaagtaaaataatttttggaacacaaatatttggcttctggntatataanccatc

SEQ ID NO: 396 - DNA, 570 bp, Homo sapiens
  misc_feature (479)..(479): n is a, c, g, or t
  misc_feature (511)..(511): n is a, c, g, or t
  misc_feature (520)..(520): n is a, c, g, or t
  misc_feature (524)..(524): n is a, c, g, or t
  misc_feature (532)..(532): n is a, c, g, or t
  misc_feature (540)..(540): n is a, c, g, or t
  misc_feature (557)..(557): n is a, c, g, or t
  misc_feature (559)..(560): n is a, c, g, or t
  misc_feature (563)..(563): n is a, c, g, or t
  misc_feature (566)..(566): n is a, c, g, or t
gaattgcttggacctgggaggcataggttgtggtaagccgagattgcgccatcgcactccagcctgggcaacaagagtgaaactccgtctcaaacaaacaaacaaaaaagacacaaaagtaaaggacttcttgacctctggttgaaagagtagcgcatggggggtgtttctggcaaacaaaccttcccaacaacgtcagaactgtgttcacaaatgctaacctgtcggcctggttatagaacatcctcttccctcaggggtatctggcagaggcaggtacccgtggaatggtgcaggtggtgcccatgctctagtgtatgccaagagttcctacttttacaaagtagccactttaaaaaaatgttggtactggccaacattcctttcatgcacccaggagggcagcaggtacctgggatccaaggatggatggccagggcaggtggctgaaaaatgggggtgggtcaagaaggatgtanctcctggggtggcgcccaacaaaaaaaattangggtagggngggngctatggntggaatgnttatcccccccaaactnannttnaanggaa

SEQ ID NO: 397 - DNA, 669 bp, Homo sapiens
  misc_feature (424)..(424): n is a, c, g, or t
  misc_feature (443)..(443): n is a, c, g, or t
  misc_feature (490)..(490): n is a, c, g, or t
  misc_feature (492)..(492): n is a, c, g, or t
  misc_feature (500)..(500): n is a, c, g, or t
  misc_feature (523)..(524): n is a, c, g, or t
  misc_feature (536)..(536): n is a, c, g, or t
  misc_feature (543)..(543): n is a, c, g, or t
  misc_feature (548)..(548): n is a, c, g, or t
  misc_feature (557)..(557): n is a, c, g, or t
  misc_feature (581)..(581): n is a, c, g, or t
  misc_feature (602)..(602): n is a, c, g, or t
  misc_feature (605)..(605): n is a, c, g, or t
  misc_feature (614)..(614): n is a, c, g, or t
  misc_feature (617)..(617): n is a, c, g, or t
  misc_feature (623)..(623): n is a, c, g, or t
  misc_feature (626)..(626): n is a, c, g, or t
  misc_feature (630)..(630): n is a, c, g, or t
  misc_feature (632)..(632): n is a, c, g, or t
  misc_feature (641)..(641): n is a, c, g, or t
  misc_feature (647)..(650): n is a, c, g, or t
  misc_feature (652)..(652): n is a, c, g, or t
  misc_feature (661)..(661): n is a, c, g, or t
  misc_feature (663)..(663): n is a, c, g, or t
tggccaatgctctctctgtgaaacttcaaacttcaaatgaggcccaccttacatgggtcaccatgtgcatggaaagaatgtatttacactcaggtacattctcgtgggaaactggaaaccagccggcggcatcttggtgtgactgcatgcacaatgcatgcgtgtccttaaagcatttaatgttaatgtttgtatgtgtgaatgcaaaggaattttaatgatatcatggccacatcgaggtcactaaccttgggaagtaacatgatcacaagaattttgtatgtgctgagtgactattacagtaacgattgcagtgtataattgaagtagtccggcataatttcaagggcccagactccgtggaaagagtttcctgactgagtccacgtccattcaccaaggaaggcaggcagtggccttgcanaaatccctcacaatgatgntgggcatcccatctaccttggtttttagggctggcataataatgccngnctattcanttttaagacagatatattttacnnataaaccctggnggggcanaaaanccccctggnttctaactctaacctgggctcttnccttactgggccctggggggntgntcctattcnatnaaaaanccnccancngacggctcnagaatnnnncnccatccaancnaattca

SEQ ID NO: 398 - DNA, 719 bp, Homo sapiens
  misc_feature (37)..(37): n is a, c, g, or t
  misc_feature (39)..(39): n is a, c, g, or t
  misc_feature (399)..(399): n is a, c, g, or t
  misc_feature (432)..(432): n is a, c, g, or t
  misc_feature (441)..(441): n is a, c, g, or t
  misc_feature (478)..(478): n is a, c, g, or t
  misc_feature (490)..(490): n is a, c, g, or t
  misc_feature (498)..(498): n is a, c, g, or t
  misc_feature (500)..(500): n is a, c, g, or t
  misc_feature (512)..(512): n is a, c, g, or t
  misc_feature (527)..(527): n is a, c, g, or t
  misc_feature (539)..(539): n is a, c, g, or t
  misc_feature (572)..(572): n is a, c, g, or t
  misc_feature (574)..(574): n is a, c, g, or t
  misc_feature (584)..(584): n is a, c, g, or t
  misc_feature (587)..(587): n is a, c, g, or t
  misc_feature (590)..(590): n is a, c, g, or t
  misc_feature (596)..(596): n is a, c, g, or t
  misc_feature (599)..(599): n is a, c, g, or t
  misc_feature (614)..(614): n is a, c, g, or t
  misc_feature (623)..(623): n is a, c, g, or t
  misc_feature (635)..(635): n is a, c, g, or t
  misc_feature (639)..(639): n is a, c, g, or t
  misc_feature (647)..(647): n is a, c, g, or t
  misc_feature (652)..(653): n is a, c, g, or t
  misc_feature (659)..(659): n is a, c, g, or t
  misc_feature (664)..(664): n is a, c, g, or t
  misc_feature (669)..(669): n is a, c, g, or t
  misc_feature (677)..(677): n is a, c, g, or t
  misc_feature (684)..(685): n is a, c, g, or t
  misc_feature (687)..(688): n is a, c, g, or t
  misc_feature (696)..(697): n is a, c, g, or t
  misc_feature (702)..(702): n is a, c, g, or t
  misc_feature (705)..(706): n is a, c, g, or t
ttcataggaatagggaacaaacaccacagtggcacantnatgggaaggagcccaggctaggagttaggagacagtgggggcttctctgacaccaccagggctctcatctgtaaaatgatatctgtcttaaaactgaatgagacctggcattattatggccagccctgaaaaccaaggtagatgggatgcacaacatcattgtgagggatttctgcaaggccactgcctgccttccttggtgaatggacgtggactcagtcaggaaactctttccacggagtctgggcccttgaaattatgccggactacttcaattatacactgcaatcgttactgtaatagtcactcagcacatacaaaattcttgggatcatgttacttccaagggtagtgacctcnatgtggccatgatatcattaaaattcctttgcnttccccctnccaacattaacattaaatgctttaaggaccccctgcntttggcatgcancacccaanangccgccgctggnttccatttcccccanaaggacctgaanggaaatacttctttcctcccatggggaccctgnangggggcccanttnaanttgaanttncaaaaaacattggcncggaatccnctgaccccgggngttncttacaantgggnngggggnaaaanaaaanaaccggcnggcctgnnannccaatttnnaaaanctnnactgggggcgttg

SEQ ID NO: 399 - DNA, 786 bp, Homo sapiens
  misc_feature (443)..(443): n is a, c, g, or t
  misc_feature (531)..(533): n is a, c, g, or t
  misc_feature (535)..(535): n is a, c, g, or t
  misc_feature (542)..(542): n is a, c, g, or t
  misc_feature (551)..(551): n is a, c, g, or t
  misc_feature (584)..(584): n is a, c, g, or t
  misc_feature (588)..(588): n is a, c, g, or t
  misc_feature (619)..(619): n is a, c, g, or t
  misc_feature (622)..(622): n is a, c, g, or t
  misc_feature (625)..(625): n is a, c, g, or t
  misc_feature (627)..(627): n is a, c, g, or t
  misc_feature (641)..(641): n is a, c, g, or t
  misc_feature (663)..(663): n is a, c, g, or t
  misc_feature (666)..(666): n is a, c, g, or t
  misc_feature (686)..(686): n is a, c, g, or t
  misc_feature (700)..(700): n is a, c, g, or t
  misc_feature (709)..(709): n is a, c, g, or t
  misc_feature (714)..(714): n is a, c, g, or t
  misc_feature (716)..(716): n is a, c, g, or t
  misc_feature (723)..(723): n is a, c, g, or t
  misc_feature (727)..(727): n is a, c, g, or t
  misc_feature (729)..(729): n is a, c, g, or t
  misc_feature (744)..(746): n is a, c, g, or t
  misc_feature (750)..(750): n is a, c, g, or t
  misc_feature (754)..(754): n is a, c, g, or t
  misc_feature (757)..(757): n is a, c, g, or t
  misc_feature (766)..(766): n is a, c, g, or t
  misc_feature (768)..(768): n is a, c, g, or t
  misc_feature (772)..(773): n is a, c, g, or t
  misc_feature (776)..(776): n is a, c, g, or t
  misc_feature (785)..(785): n is a, c, g, or t
caaagataagacccccgaaaccagacgagctacctaagaacagctaaaagagcacacccgtctatgtagcaaaatagtgggaagatttataggtagaggcgacaaacctaccgagcctggtgatagctggttgtccaagatagaatcttagttcaactttaaatttgcccacagaaccctctaaatccccttgtaaatttaactgttagtccaaagaggaacagctctttggacactaggaaaaaaccttgtagagagagtaaaaaatttaacacccatagtaggcctaaaagcagccaccaattaagaaagcgttcaagctcaacacccactacctaaaaaatcccaaacatataactgaactcctcacacccaattggaccaatctatcaccctatagaaaaactaatggtagtataaagtaacatgaaaacattcttctncgcataagcctgcgtcagattaaaaccttgaactgacattaacagcccaatatctacaatcaaccacaagtcattattaccctactgnnnanccaccangcatgctcntaaggaaaggttaaaaaagtaaaaggactcggnaatnttacccgctgtttccaaaaaattaccttacntcnccntnttaaggccccctgnccatgaccatgtttaaggccgnggnccctaccggcaaaggggganaatacttttcttantagggcccnttaangntccccanggtnanttttttattttacannnaatnactnccngaaaggggntnaacnnaanaaaaaaacnt

SEQ ID NO: 400 - DNA, 469 bp, Homo sapiens
  misc_feature (302)..(302): n is a, c, g, or t
  misc_feature (317)..(317): n is a, c, g, or t
  misc_feature (329)..(329): n is a, c, g, or t
  misc_feature (354)..(354): n is a, c, g, or t
  misc_feature (357)..(357): n is a, c, g, or t
  misc_feature (367)..(367): n is a, c, g, or t
  misc_feature (391)..(391): n is a, c, g, or t
  misc_feature (397)..(397): n is a, c, g, or t
  misc_feature (422)..(422): n is a, c, g, or t
  misc_feature (428)..(428): n is a, c, g, or t
  misc_feature (439)..(439): n is a, c, g, or t
  misc_feature (444)..(444): n is a, c, g, or t
  misc_feature (450)..(450): n is a, c, g, or t
  misc_feature (465)..(465): n is a, c, g, or t
ggttgggttctgctccgaggtcgccccaaccgaaatttttaatgcaggtttggtagtttaggacctgtgggtttgttaggtactgtttgcattaataaattaaagccccatagggtcttctcgtcttgctgtgtcatgcccgcctcttcacgggcaggtcaatttcactggttaaaagtaagagacagctgaaccctcgtggagccattcatacaggtccctaattaaggaacaagtgattatgctacctttgcacggttagggtaccgcggccgttaaacatgtgtcactgggcaggcggngcctctaatactggngatgctagaggngatgtttttggtaaacaggcggggnaanattgccgagntccttttactttttttaacctttncttatnaacatgcctgtgttgggttgacagngagggnaataatgactngtggntgatgnaaaaattgggctgtnattg

SEQ ID NO: 401 - DNA, 716 bp, Homo sapiens
  misc_feature (165)..(165): n is a, c, g, or t
  misc_feature (427)..(427): n is a, c, g, or t
  misc_feature (435)..(435): n is a, c, g, or t
  misc_feature (440)..(440): n is a, c, g, or t
  misc_feature (445)..(445): n is a, c, g, or t
  misc_feature (450)..(450): n is a, c, g, or t
  misc_feature (466)..(466): n is a, c, g, or t
  misc_feature (483)..(483): n is a, c, g, or t
  misc_feature (494)..(494): n is a, c, g, or t
  misc_feature (503)..(503): n is a, c, g, or t
  misc_feature (507)..(507): n is a, c, g, or t
  misc_feature (556)..(556): n is a, c, g, or t
  misc_feature (558)..(558): n is a, c, g, or t
  misc_feature (562)..(562): n is a, c, g, or t
  misc_feature (571)..(572): n is a, c, g, or t
  misc_feature (576)..(576): n is a, c, g, or t
  misc_feature (581)..(581): n is a, c, g, or t
  misc_feature (583)..(583): n is a, c, g, or t
  misc_feature (587)..(587): n is a, c, g, or t
  misc_feature (594)..(594): n is a, c, g, or t
  misc_feature (599)..(599): n is a, c, g, or t
  misc_feature (608)..(608): n is a, c, g, or t
  misc_feature (621)..(621): n is a, c, g, or t
  misc_feature (628)..(628): n is a, c, g, or t
  misc_feature (638)..(638): n is a, c, g, or t
  misc_feature (644)..(644): n is a, c, g, or t
  misc_feature (646)..(647): n is a, c, g, or t
  misc_feature (667)..(667): n is a, c, g, or t
  misc_feature (674)..(674): n is a, c, g, or t
  misc_feature (684)..(684): n is a, c, g, or t
  misc_feature (691)..(691): n is a, c, g, or t
  misc_feature (695)..(695): n is a, c, g, or t
  misc_feature (699)..(700): n is a, c, g, or t
gggtaccaaatttctttatttgaaggaatggtacaaatcaaagaacttaagtggatgttttggtacaacttatagaaaaggtaaaggaaaccccaacatgcatgcactgccttggtgaccagggaagtcaccccacggctatggggaaattagcccgaggcttanctttcattatcactgtctcccagggtgtgcttgtcaaagagatattccgccaagccagattcgggcgctcccatcttgcgcaagttggtcacgtggtcacccaattctttgatggctttcacctgctcattcaggtaatgtgtctcaatgaagtcacacaaatgggggtcatttttgtcaagtggccagtttgtgcagttccagtagtgactgattcacatttttttccaaatgtaatgcacactccattgcattcacccgntctcccantcatnacaanctggnttttgatatcctgaangaaaaatcggcccctcnttggtcttgancttcatcantttntaacatgttcctttcctatgaaattggggaaaaaagtatttgcaaattntnaaancccattatnncggncaaanantaanaaatggncaggnaacctaggnggaatccacttancccggcntccataccantgggcngnngcaaaaaaaaataaccggcnggccttnaaccaattcnccctggngccntctnnggatccaccggccaac

SEQ ID NO: 402 - DNA, 602 bp, Homo sapiens
  misc_feature (575)..(575): n is a, c, g, or t
  misc_feature (584)..(584): n is a, c, g, or t
cctacgtttacctgtccatgtcttactactttgaccgcgatgatgtggctttgaagaactttgccaaatactttcttcaccaatctcatgaggagagggaacatgctgagaaactgatgaagctgcagaaccaacgaggtggccgaatcttccttcaggatatcaagaaaccagactgtgatgactgggagagcgggctgaatgcaatggagtgtgcattacatttggaaaaaaatgtgaatcagtcactactggaactgcacaaactggccactgacaaaaatgacccccatttgtgtgacttcattgagacacattacctgaatgagcaggtgaaagccatcaaagaattgggtgaccacgtgaccaacttgcgcaagatgggagcgcccgaatctggcttggcggaatatctctttgacaagcacaccctgggagacagtgataatgaaagctaagcctcggctaatttcccataccgtggggtgacttccttggcccaaggcagtgcatgcatgttggggttccttacctttctataattggaccaaaacatcccttaagtctttgattgnccattcttnaataaaaaatttggaccc

SEQ ID NO: 403 - DNA, 612 bp, Homo sapiens
  misc_feature (335)..(335): n is a, c, g, or t
  misc_feature (361)..(361): n is a, c, g, or t
  misc_feature (364)..(364): n is a, c, g, or t
  misc_feature (370)..(370): n is a, c, g, or t
  misc_feature (393)..(394): n is a, c, g, or t
  misc_feature (402)..(402): n is a, c, g, or t
  misc_feature (409)..(409): n is a, c, g, or t
  misc_feature (418)..(418): n is a, c, g, or t
  misc_feature (430)..(430): n is a, c, g, or t
  misc_feature (461)..(461): n is a, c, g, or t
  misc_feature (465)..(465): n is a, c, g, or t
  misc_feature (468)..(468): n is a, c, g, or t
  misc_feature (476)..(476): n is a, c, g, or t
  misc_feature (478)..(479): n is a, c, g, or t
  misc_feature (482)..(483): n is a, c, g, or t
  misc_feature (485)..(486): n is a, c, g, or t
  misc_feature (490)..(491): n is a, c, g, or t
  misc_feature (496)..(499): n is a, c, g, or t
  misc_feature (503)..(503): n is a, c, g, or t
  misc_feature (506)..(506): n is a, c, g, or t
  misc_feature (512)..(512): n is a, c, g, or t
  misc_feature (519)..(519): n is a, c, g, or t
  misc_feature (546)..(546): n is a, c, g, or t
  misc_feature (554)..(554): n is a, c, g, or t
  misc_feature (558)..(558): n is a, c, g, or t
  misc_feature (570)..(570): n is a, c, g, or t
  misc_feature (574)..(574): n is a, c, g, or t
  misc_feature (576)..(577): n is a, c, g, or t
  misc_feature (600)..(601): n is a, c, g, or t
  misc_feature (606)..(606): n is a, c, g, or t
  misc_feature (609)..(609): n is a, c, g, or t
ggctaacaatctccagaaggttcattcaggcccatgcaaatcagtgccggagcctagagacagcacagcctagagctagaggtcaggcagggctgagctgagtcacccactattcagacctccctcttagagcctcagctactggatggtggtcattaagttatcatttaaactacagacgcaggctgggtacggtgactcaaccctatagccccagcactttgggaggccaagatgggaggatcacttgaggtcgggagttcaacaccagcctggccaacatgatgaaaccccgtctctactaaaaatacaaaaactagctgggtgtggggggngcacatctttaatcccagcttctcangangctgangcaggaggatcacttaaacccannaagtggangctgcanggagcccanatcgcacacttnactccacctgggtgacagaatgagactcatnttcnaangaaaccancnnccnntnnctcnntgccnnnngtanctnttaccnatccttnccaaggaccccaccttaccatacttgntactaggnggcncctgaatttccnaaancnntcttaagggggcctcaagtttannggccnttnctt

SEQ ID NO: 404 - DNA, 640 bp, Homo sapiens
  misc_feature (264)..(264): n is a, c, g, or t
  misc_feature (403)..(403): n is a, c, g, or t
  misc_feature (419)..(419): n is a, c, g, or t
  misc_feature (425)..(425): n is a, c, g, or t
  misc_feature (444)..(444): n is a, c, g, or t
  misc_feature (457)..(457): n is a, c, g, or t
  misc_feature (502)..(502): n is a, c, g, or t
  misc_feature (508)..(508): n is a, c, g, or t
  misc_feature (513)..(513): n is a, c, g, or t
  misc_feature (528)..(528): n is a, c, g, or t
  misc_feature (531)..(531): n is a, c, g, or t
  misc_feature (536)..(536): n is a, c, g, or t
  misc_feature (538)..(538): n is a, c, g, or t
  misc_feature (546)..(546): n is a, c, g, or t
  misc_feature (548)..(549): n is a, c, g, or t
  misc_feature (554)..(554): n is a, c, g, or t
  misc_feature (588)..(588): n is a, c, g, or t
  misc_feature (590)..(590): n is a, c, g, or t
  misc_feature (592)..(592): n is a, c, g, or t
  misc_feature (595)..(595): n is a, c, g, or t
  misc_feature (597)..(598): n is a, c, g, or t
  misc_feature (600)..(600): n is a, c, g, or t
  misc_feature (604)..(604): n is a, c, g, or t
  misc_feature (606)..(606): n is a, c, g, or t
  misc_feature (615)..(616): n is a, c, g, or t
  misc_feature (622)..(622): n is a, c, g, or t
  misc_feature (625)..(625): n is a, c, g, or t
  misc_feature (629)..(629): n is a, c, g, or t
  misc_feature (631)..(632): n is a, c, g, or t
  misc_feature (634)..(634): n is a, c, g, or t
gtgatctcggctcactgcaacctctgcctcctgggttcaagcgattcttgtgcctcaacctcccgagtagctggcattacaggagcccgcccaccatgcctagctaatttttgtatttttagtagagacagggtttcaccatgttggccaggttggtctggaactcctgaccttgtgatctgcctgccttggcctcccaaagtgctggaattacaggtgtgagtcaccgcgcccaagtataggccacttttaagaattactcanagttagcttataagaggcgaatcagtggagtcctccagtttggttcacacataattattaggttgaaccatataaagttactgtttttggtcctgtgaatattaatatttatatatgggtccaatctgatatgttccanaaaatacacacttaantaaagnttggaaaaccaaatcatanacttacatactgnaaggcggggtatttgaaactgggatggaaaatcaatttaatgagntatganctgcnttaaaaaaatggganaanatcananttggtggnannattgnaaaaaaccaaattgctggggaagattggcatttnantnttntnncncccngnggggggggnngggggnacnaaangnnanaaagaa

SEQ ID NO: 405 - DNA, 469 bp, Homo sapiens
  misc_feature (261)..(261): n is a, c, g, or t
  misc_feature (317)..(318): n is a, c, g, or t
  misc_feature (321)..(321): n is a, c, g, or t
  misc_feature (324)..(324): n is a, c, g, or t
  misc_feature (329)..(329): n is a, c, g, or t
  misc_feature (332)..(332): n is a, c, g, or t
  misc_feature (334)..(334): n is a, c, g, or t
  misc_feature (336)..(336): n is a, c, g, or t
  misc_feature (339)..(339): n is a, c, g, or t
  misc_feature (345)..(345): n is a, c, g, or t
  misc_feature (357)..(357): n is a, c, g, or t
  misc_feature (363)..(363): n is a, c, g, or t
  misc_feature (366)..(366): n is a, c, g, or t
  misc_feature (377)..(377): n is a, c, g, or t
  misc_feature (379)..(379): n is a, c, g, or t
  misc_feature (385)..(385): n is a, c, g, or t
  misc_feature (388)..(388): n is a, c, g, or t
  misc_feature (390)..(390): n is a, c, g, or t
  misc_feature (392)..(392): n is a, c, g, or t
  misc_feature (409)..(409): n is a, c, g, or t
  misc_feature (413)..(413): n is a, c, g, or t
  misc_feature (420)..(420): n is a, c, g, or t
  misc_feature (430)..(430): n is a, c, g, or t
  misc_feature (437)..(437): n is a, c, g, or t
  misc_feature (441)..(441): n is a, c, g, or t
  misc_feature (451)..(451): n is a, c, g, or t
  misc_feature (453)..(455): n is a, c, g, or t
  misc_feature (458)..(461): n is a, c, g, or t
  misc_feature (465)..(466): n is a, c, g, or t
cagttccacccgggcaggcagtcgggggatgaggggccgtctagcgtccgcacgcgttcactcccaaggaaggtgtgtgggcacggtgaggagtgggaagaaacagaataggaaagtggcctgacacggggattctaagcaggtcaaaagttatgttgccttgtaggatgggaagagaaaaataaaaatttgatttgttgtttaaagtgatggggttctggggatatttttcctttttaattttaatatctttggattaanttttttttctctttttttcaacggagtctcactctgtcaccctgggtggagtgcannggnacnatctnggntnantgnaacctncactttctgggntcaagngantcttctggctnancctccnaanantnggaatacaggccctgcnccangcctggntaattttggnttttaanaaancggaattccncnnnctnnnngctnnaga

SEQ ID NO: 406 - DNA, 667 bp, Homo sapiens
  misc_feature (282)..(282): n is a, c, g, or t
  misc_feature (311)..(311): n is a, c, g, or t
  misc_feature (325)..(325): n is a, c, g, or t
  misc_feature (349)..(349): n is a, c, g, or t
  misc_feature (360)..(360): n is a, c, g, or t
  misc_feature (363)..(363): n is a, c, g, or t
  misc_feature (404)..(404): n is a, c, g, or t
  misc_feature (466)..(466): n is a, c, g, or t
  misc_feature (478)..(478): n is a, c, g, or t
  misc_feature (510)..(510): n is a, c, g, or t
  misc_feature (518)..(518): n is a, c, g, or t
  misc_feature (527)..(527): n is a, c, g, or t
  misc_feature (529)..(529): n is a, c, g, or t
  misc_feature (531)..(532): n is a, c, g, or t
  misc_feature (536)..(536): n is a, c, g, or t
  misc_feature (542)..(543): n is a, c, g, or t
  misc_feature (550)..(550): n is a, c, g, or t
  misc_feature (555)..(555): n is a, c, g, or t
  misc_feature (557)..(557): n is a, c, g, or t
  misc_feature (564)..(564): n is a, c, g, or t
  misc_feature (568)..(568): n is a, c, g, or t
  misc_feature (578)..(579): n is a, c, g, or t
  misc_feature (585)..(586): n is a, c, g, or t
  misc_feature (590)..(591): n is a, c, g, or t
  misc_feature (593)..(594): n is a, c, g, or t
  misc_feature (597)..(597): n is a, c, g, or t
  misc_feature (601)..(602): n is a, c, g, or t
  misc_feature (609)..(609): n is a, c, g, or t
  misc_feature (617)..(621): n is a, c, g, or t
  misc_feature (624)..(624): n is a, c, g, or t
  misc_feature (633)..(633): n is a, c, g, or t
  misc_feature (636)..(637): n is a, c, g, or t
  misc_feature (639)..(639): n is a, c, g, or t
  misc_feature (643)..(643): n is a, c, g, or t
  misc_feature (647)..(648): n is a, c, g, or t
  misc_feature (653)..(654): n is a, c, g, or t
ctttactaaaaatacaaaaattagccaggcatggtggcaggtgcctgtaatcccagctattcgggaggctgaggcaggagaatcacttgaacccaggaagtggaggttgcagtgagccgagatcgtaccactgcactccacccagggtgacagagtgagactccgttgaaaaaaagagaaaaaaaaattaatacaaagatattaaaattaaaaaggaaaaatatccccagaaccccatcacttaaacaacaaatcaaatttttatttttctcttcccatccnacaaggcaacataactcttacctgcttanaatccccgtgtcangccactttcctattctgtttcttnccactcctcancgngcccacacacctttcttgggagtgaacgcgtgcggacctanacggccctcatccccgactggctgcccgggtggaactggggaattccacttaacgccggcgntccattaccaantgatcttggggcaaaaataataataaccggcnggcctgtnaagcccaantntnnaaanttcttnnacttggnggcgntnagcagcntttnagggccaatnncctatnngggnngnntanaatnntggccgngtttaaannnnngangggaaaccnggnntnccantaanncttgnnaaatcccttttcc

SEQ ID NO: 407 - DNA, 161 bp, Homo sapiens
  misc_feature (106)..(106): n is a, c, g, or t
  misc_feature (111)..(111): n is a, c, g, or t
  misc_feature (142)..(142): n is a, c, g, or t
  misc_feature (147)..(147): n is a, c, g, or t
  misc_feature (149)..(150): n is a, c, g, or t
  misc_feature (155)..(156): n is a, c, g, or t
  misc_feature (160)..(160): n is a, c, g, or t
cagttccacccgggcaggcagtcgggggatgaggggccgtctagcgtccgcacgcgttcactcccaaggaaggtgtgtgggcacggtgaggagtgggaagaaacanaatangaaagtggcctgacacggggattctaagcangtcananntatgnngctng

SEQ ID NO: 408 - DNA, 443 bp, Homo sapiens
  misc_feature (409)..(409): n is a, c, g, or t
ctttactaaaaatacaaaaattagccaggcatggtggcaggtgcctgtaatcccagctattcgggaggctgaggcaggagaatcacttgaacccaggaagtggaggttgcagtgagccgagatcgtaccactgcactccacccagggtgacagagtgagactccgttgaaaaaaagagaaaaaaaaattaatacaaagatattaaaattaaaaaggaaaaatatccccagaaccccatcacttaaacaacaaatcaaatttttatttttctcttcccatcctacaaggcaacataactctgacctgcttagaatccccgtgtcaggccactttcctattctgtttcttcccactcctcaccgtgcccacacaccttcttgggagtgaacgcgtgcggacgctagacggnccctcatcccccgactgcctgcccgggtggaact

SEQ ID NO: 409 - DNA, 263 bp, Homo sapiens
ctgcgtcagattaaaacactgaactgacaattaacagcccaatatctacaatcaaccaacaagtcattattaccctcactgtcaacccaacacaggcatgctcataaggaaaggttaaaaaaagtaaaaggaactcggcaaatcttaccccgcctgtttaccaaaaacatcacctctagcatcaccagtattagaggcaccgcctgcccagtgacacatgtttaacggccgcggtaccctaaccgtgcaaaggtagcataatc

SEQ ID NO: 410 - DNA, 262 bp, Homo sapiens
  misc_feature (245)..(245): n is a, c, g, or t
gattatgctacctttgcacggttagggtaccgcggccgttaaacatgtgtcactgggcaggcggtgcctctaatactggtgatgctagaggtgatgtttttggtaaacaggcggggtaagatttgccgagttccttttactttttttaacctttccttatgagcatgcctgtgttgggttgacagtgagggtaataatgacttgttggttgattgtagatattgggctgttaattgtcagttcantgttttaatctgacgca

SEQ ID NO: 411 - DNA, 431 bp, Homo sapiens
  misc_feature (6)..(7): n is a, c, g, or t
  misc_feature (26)..(26): n is a, c, g, or t
  misc_feature (28)..(28): n is a, c, g, or t
  misc_feature (31)..(31): n is a, c, g, or t
  misc_feature (49)..(49): n is a, c, g, or t
  misc_feature (64)..(65): n is a, c, g, or t
  misc_feature (74)..(74): n is a, c, g, or t
  misc_feature (76)..(76): n is a, c, g, or t
  misc_feature (98)..(98): n is a, c, g, or t
  misc_feature (111)..(111): n is a, c, g, or t
  misc_feature (136)..(136): n is a, c, g, or t
  misc_feature (146)..(146): n is a, c, g, or t
  misc_feature (148)..(148): n is a, c, g, or t
  misc_feature (156)..(156): n is a, c, g, or t
  misc_feature (159)..(159): n is a, c, g, or t
  misc_feature (161)..(161): n is a, c, g, or t
  misc_feature (166)..(166): n is a, c, g, or t
  misc_feature (170)..(171): n is a, c, g, or t
  misc_feature (178)..(178): n is a, c, g, or t
  misc_feature (180)..(181): n is a, c, g, or t
  misc_feature (183)..(183): n is a, c, g, or t
  misc_feature (191)..(191): n is a, c, g, or t
  misc_feature (194)..(194): n is a, c, g, or t
  misc_feature (198)..(198): n is a, c, g, or t
  misc_feature (215)..(215): n is a, c, g, or t
  misc_feature (218)..(218): n is a, c, g, or t
  misc_feature (220)..(220): n is a, c, g, or t
  misc_feature (233)..(233): n is a, c, g, or t
  misc_feature (245)..(245): n is a, c, g, or t
  misc_feature (250)..(251): n is a, c, g, or t
  misc_feature (255)..(256): n is a, c, g, or t
  misc_feature (264)..(264): n is a, c, g, or t
  misc_feature (269)..(270): n is a, c, g, or t
  misc_feature (275)..(275): n is a, c, g, or t
  misc_feature (277)..(277): n is a, c, g, or t
  misc_feature (279)..(279): n is a, c, g, or t
  misc_feature (286)..(287): n is a, c, g, or t
  misc_feature (298)..(298): n is a, c, g, or t
  misc_feature (300)..(300): n is a, c, g, or t
  misc_feature (315)..(315): n is a, c, g, or t
  misc_feature (319)..(319): n is a, c, g, or t
  misc_feature (325)..(325): n is a, c, g, or t
  misc_feature (334)..(335): n is a, c, g, or t
  misc_feature (341)..(341): n is a, c, g, or t
  misc_feature (345)..(345): n is a, c, g, or t
  misc_feature (348)..(348): n is a, c, g, or t
  misc_feature (351)..(356): n is a, c, g, or t
  misc_feature (358)..(358): n is a, c, g, or t
  misc_feature (363)..(363): n is a, c, g, or t
  misc_feature (368)..(368): n is a, c, g, or t
  misc_feature (373)..(373): n is a, c, g, or t
  misc_feature (375)..(375): n is a, c, g, or t
  misc_feature (378)..(378): n is a, c, g, or t
  misc_feature (383)..(383): n is a, c, g, or t
  misc_feature (388)..(388): n is a, c, g, or t
  misc_feature (392)..(393): n is a, c, g, or t
  misc_feature (396)..(396): n is a, c, g, or t
  misc_feature (398)..(401): n is a, c, g, or t
  misc_feature (403)..(403): n is a, c, g, or t
  misc_feature (409)..(409): n is a, c, g, or t
  misc_feature (411)..(411): n is a, c, g, or t
  misc_feature (414)..(416): n is a, c, g, or t
  misc_feature (419)..(420): n is a, c, g, or t
gggggnngggttttttttaaaaaaanantgnacatttatttattactgnccctatttattaaanngactttttntnaaccaagggcttttactttttnttcttgcctttangggcttcagggggttttcccttaantacaaccaantntttttttnaancnaaaantttnnccacctncnnancaacctcnttnttgnctgccttttgtgctttnaantntcggacagtttgnaagtcctcaaanacctnnaggnngaaataanatttnncccancnancccattnntgggtatacancngaaggaatataaatnactnttttanaaaaacacnncccatntttnttnctnnnnnntntttanaacanccccnanatnaaatnaaccnaatnnccntnnnngnggattncnccnnnctnncggctcaaaaa

SEQ ID NO: 412 - DNA, 396 bp, Homo sapiens
cactgatgggcatttgggttgatttcatgtcgtggctgttgtgaatagtgctgcagtgaacatacatgtgcatgtgtctttatgatagagtgatttataatccttcaggtgtatacccagtaatgggattgctgggtcaaatgttatttctgcctctaggtctttgaggacttgcaaactgtccgagaactgaaagcacaaaaggcagacaagaacgaggttgctgcggaggtggcgaaactcttggatctaaagaaacagttggctgtagctgaggggaaaccccctgaagcccctaaaggcaagaagaaaaagtaaaagaccttggctcatagaaagtcactttaatagatagggacagtaataaataaatgtacaatctctatattaaaaaaa

SEQ ID NO: 413 - DNA, 426 bp, Homo sapiens
  misc_feature (340)..(340): n is a, c, g, or t
  misc_feature (360)..(360): n is a, c, g, or t
  misc_feature (398)..(398): n is a, c, g, or t
cctttctattagctcttagtaagattacacatgcaagcatccccattccagtgagttcaccctctaaatcaccacgatcaaaagggacaagcatcaagcacgcagcaatgcagctcaaaacgcttagcctagccacacccccacgggaaacagcagtgattaacctttagcaataaacgaaagtttaactaagctatactaaccccagggttggtcaatttcgtgccagccaccgcggtcacacgattaacccaagtcaatagaaaccggcgtaaagagtgttttagatcaccccctccccaataaagctaaaactcacctgagttgtaaaaaactccanttgacacaaaatagactacnaaagtggctttaacatatcttaacacacaatagctaanacccaaactgggattagcggaatccccg

SEQ ID NO: 414 - DNA, 517 bp, Homo sapiens
  misc_feature (236)..(236): n is a, c, g, or t
  misc_feature (282)..(282): n is a, c, g, or t
  misc_feature (297)..(297): n is a, c, g, or t
  misc_feature (326)..(326): n is a, c, g, or t
  misc_feature (355)..(355): n is a, c, g, or t
  misc_feature (378)..(378): n is a, c, g, or t
  misc_feature (393)..(393): n is a, c, g, or t
  misc_feature (399)..(399): n is a, c, g, or t
  misc_feature (409)..(410): n is a, c, g, or t
  misc_feature (412)..(412): n is a, c, g, or t
  misc_feature (415)..(415): n is a, c, g, or t
  misc_feature (418)..(418): n is a, c, g, or t
  misc_feature (428)..(428): n is a, c, g, or t
  misc_feature (431)..(433): n is a, c, g, or t
  misc_feature (436)..(436): n is a, c, g, or t
  misc_feature (438)..(438): n is a, c, g, or t
  misc_feature (445)..(446): n is a, c, g, or t
  misc_feature (458)..(458): n is a, c, g, or t
  misc_feature (462)..(464): n is a, c, g, or t
  misc_feature (467)..(467): n is a, c, g, or t
  misc_feature (470)..(471): n is a, c, g, or t
  misc_feature (484)..(484): n is a, c, g, or t
  misc_feature (487)..(487): n is a, c, g, or t
  misc_feature (489)..(489): n is a, c, g, or t
  misc_feature (492)..(492): n is a, c, g, or t
  misc_feature (496)..(496): n is a, c, g, or t
  misc_feature (503)..(503): n is a, c, g, or t
  misc_feature (511)..(511): n is a, c, g, or t
  misc_feature (514)..(514): n is a, c, g, or t
cggattccgctaatcccagtttgggtcttagctattgtgtgttcagatatgttaaagccactttcgtagtctattttgtgtcaactggagttttttacaactcaggtgagttttagctttattggggagggggtgatctaaaacactctttacgccggtttctattgacttgggttaatcgtgtgaccgcggtggctggcacgaaattgaccaaccctggggttagtatagcttanttaaactttcgtttattgctaaaggggtaatcactgctgtttcccntgggggtgtggctangctaaacgttttgagctgcattgctgcgngcttgatgcttgtccctttttatcatggngatttataaggggaactccctgnaatggggatgctccntgtgtnatcttactannanctntanaaaggggggnttnnnctnancgccggnngtccataacaanaggnnnggnggnnaaaaaataataancgncnggncatnttagccnaatattcnganatc

SEQ ID NO: 415 - DNA, 537 bp, Homo sapiens
  misc_feature (307)..(307): n is a, c, g, or t
  misc_feature (322)..(322): n is a, c, g, or t
  misc_feature (327)..(327): n is a, c, g, or t
  misc_feature (341)..(341): n is a, c, g, or t
  misc_feature (378)..(378): n is a, c, g, or t
  misc_feature (428)..(429): n is a, c, g, or t
  misc_feature (431)..(431): n is a, c, g, or t
  misc_feature (433)..(433): n is a, c, g, or t
  misc_feature (435)..(435): n is a, c, g, or t
  misc_feature (438)..(438): n is a, c, g, or t
  misc_feature (457)..(459): n is a, c, g, or t
  misc_feature (476)..(476): n is a, c, g, or t
  misc_feature (489)..(489): n is a, c, g, or t
  misc_feature (497)..(497): n is a, c, g, or t
  misc_feature (500)..(500): n is a, c, g, or t
  misc_feature (504)..(505): n is a, c, g, or t
  misc_feature (510)..(512): n is a, c, g, or t
  misc_feature (519)..(519): n is a, c, g, or t
  misc_feature (522)..(523): n is a, c, g, or t
  misc_feature (526)..(526): n is a, c, g, or t
caaaaagataattaacctttattattcattaaaaatgagctttctaaaatattagtaaatttcattttaagctctgtcttgaagtgctgataccactgaagtaacatttttcttctttcaattttttcttgtaaaattatagttttctctttttctaaaacagcagggagttccttccagttcttgataaagataaagggagcacccatggacttgagtaactgcagaggagcacccgtggtgcacagatgtattcccacagttgccagctgtcatcacgtcttccaccacaggaatggagccatangagcaagcctcatanattcnatagcattctgtgnttactccgaccaggcacaatgtgagatcactctgaancaaggcatcttggtaattcttaaactttcatttgtttctgaggctgccanngntntnttnctgaacccacaaacttatnnntccatcttttttaaaangttcattatgccngctggatnaantttnnaaatnnntcctaanaannacntaatatggctt

SEQ ID NO: 416 - DNA, 759 bp, Homo sapiens
  misc_feature (396)..(396): n is a, c, g, or t
  misc_feature (437)..(437): n is a, c, g, or t
  misc_feature (530)..(530): n is a, c, g, or t
  misc_feature (575)..(575): n is a, c, g, or t
  misc_feature (611)..(611): n is a, c, g, or t
  misc_feature (619)..(619): n is a, c, g, or t
  misc_feature (632)..(632): n is a, c, g, or t
  misc_feature (661)..(661): n is a, c, g, or t
  misc_feature (673)..(673): n is a, c, g, or t
  misc_feature (677)..(677): n is a, c, g, or t
  misc_feature (723)..(723): n is a, c, g, or t
  misc_feature (732)..(732): n is a, c, g, or t
  misc_feature (735)..(735): n is a, c, g, or t
  misc_feature (743)..(743): n is a, c, g, or t
gcccccgcgcgggagagacgcggccgagaacagtccactttggaaagtgaagaatggaatccttgggaaggagatgaaaaaaatgagcaacaacacagatttaaaactagccttcaaatattagataaatccacgaaaggaaaaacagatctcagtgtacaaatctggggcaaagctgccattggcttgtatctctgggagcatatttttgaaggcttacttgatcccagcgatgtgactgctcaatggagagaaggaaagtcaatcgtaggaagaacacagtacagcttcatcactggtccagctgtaataccagggtacttctccgttgatgtgaataatgtggtactcattttaaatggaagagaaaaagcaaagatcttttatgccacccantggttactttatgccaaaatttaatgcaaattcaaaaactncacatcttgcttgttggtttgctcggaaatgaacattgtgataatgagtggataaacccattcttaaaagaaatggaggcttcgtggacctgnttttcataatatatacacccctggataatgactggatgtttttantggccttaggagtagcacatccggaatttcttgggngaagcaantggcaatgttctnataaaggccttttattaatttttagaacnattttaaaattntccnacggcctataacttttaaaaaaagggaccaaacttttgggttacanaaaactgcnctnggaaaaanaagttaaaattccaaa

SEQ ID NO: 417 - DNA, 595 bp, Homo sapiens
  misc_feature (192)..(192): n is a, c, g, or t
  misc_feature (308)..(308): n is a, c, g, or t
  misc_feature (382)..(383): n is a, c, g, or t
  misc_feature (420)..(421): n is a, c, g, or t
  misc_feature (437)..(437): n is a, c, g, or t
  misc_feature (439)..(439): n is a, c, g, or t
  misc_feature (445)..(445): n is a, c, g, or t
  misc_feature (467)..(467): n is a, c, g, or t
  misc_feature (469)..(470): n is a, c, g, or t
  misc_feature (483)..(483): n is a, c, g, or t
  misc_feature (506)..(506): n is a, c, g, or t
  misc_feature (512)..(513): n is a, c, g, or t
  misc_feature (518)..(519): n is a, c, g, or t
  misc_feature (525)..(525): n is a, c, g, or t
  misc_feature (529)..(529): n is a, c, g, or t
  misc_feature (533)..(533): n is a, c, g, or t
  misc_feature (535)..(536): n is a, c, g, or t
  misc_feature (538)..(538): n is a, c, g, or t
  misc_feature (547)..(547): n is a, c, g, or t
  misc_feature (551)..(551): n is a, c, g, or t
  misc_feature (553)..(553): n is a, c, g, or t
  misc_feature (555)..(555): n is a, c, g, or t
  misc_feature (559)..(560): n is a, c, g, or t
  misc_feature (565)..(567): n is a, c, g, or t
  misc_feature (570)..(570): n is a, c, g, or t
  misc_feature (579)..(579): n is a, c, g, or t
  misc_feature (585)..(585): n is a, c, g, or t
gaaagtttagaaactttaaaacaataataatgacggtgatagtgataataattgctaatgctttcagatcacatatgtgttaggcgctgttttttgttgttgttgttattgttgaggcagtctcactctgttggccaggctggagtgcagtggtgctttgcctcctgggttcaagggattctcctgcctcancctcctgagtagctgggattacaggcatgcgccaccacgtcgggctaatttttgcatttttagtggagacggggtttcatcatgttggccaggctggtctcgaactcacgacgtcnagtgatccacctgcctcggcctcccaaagtgttgggattacaaggcggtgagccaccatgcccacccgcactgnnttaaatgctttacatatattatctcatttaatcctcnnaaaccttacaatatananactacnattatttccctttatatttatngnnctcttaggctcanaaaagggaactaacttcttggtncatggnnggggnnggaatnaaanccangnnanccgctcccnaaantncnttcnntgccnnnctnactgggccntctttnaaggggggcc

SEQ ID NO: 418 - DNA, 734 bp, Homo sapiens
  misc_feature (543)..(543): n is a, c, g, or t
  misc_feature (608)..(608): n is a, c, g, or t
  misc_feature (610)..(610): n is a, c, g, or t
  misc_feature (620)..(620): n is a, c, g, or t
  misc_feature (656)..(656): n is a, c, g, or t
  misc_feature (676)..(676): n is a, c, g, or t
  misc_feature (679)..(679): n is a, c, g, or t
  misc_feature (692)..(692): n is a, c, g, or t
  misc_feature (698)..(698): n is a, c, g, or t
  misc_feature (716)..(716): n is a, c, g, or t
  misc_feature (726)..(726): n is a, c, g, or t
ttcatggggaataattgcaatccccgatccccatcacgaatggggttcaacgggtacccgcgcctgccggcgtagggtaggcacacgctgagccagtcagtgtagcgcgcgtgcagccccggacatctaagggcatcacagacctgttattgctcaatctcgggtggctgaacgccacttgtccctctaagaagttgggggacgccgaccgctcgggggtcgcgtaactagttagcatgccagagtctcgttcgttatcggaattaaccagacaaatcgctccaccaactaagaacggccatgcaccaccacccacggaatcgagaaagagctatcaatctgtcaatcctgtccgtgtccggcccgggtgaggcagtgagctgagattgcgccactgcactccaacctgggcgacagaacgagaccccatctcaaaaaaaaaggggggggtggacagggggcaagtggagtctggctgccaaaactacttgttgatggtggggaaaaaaaaatgggtgtctcctcccttgtcactgggaaggntttggttctctttcatcttcatcctctatagggcctttattcttccccaatctgaaatatttcgngngttttacttncccacatccttcaaaaatatttgaggttgataaaantaacttccgggttggacccnggntaatctttgggtntttggnttaccaaaaaaagggtcncattaacccnttttgatt

SEQ ID NO: 419 - DNA, 592 bp, Homo sapiens
  misc_feature (345)..(345): n is a, c, g, or t
  misc_feature (348)..(348): n is a, c, g, or t
  misc_feature (418)..(418): n is a, c, g, or t
  misc_feature (482)..(482): n is a, c, g, or t
  misc_feature (490)..(490): n is a, c, g, or t
  misc_feature (517)..(517): n is a, c, g, or t
  misc_feature (522)..(522): n is a, c, g, or t
  misc_feature (540)..(540): n is a, c, g, or t
  misc_feature (548)..(548): n is a, c, g, or t
  misc_feature (578)..(578): n is a, c, g, or t
  misc_feature (587)..(587): n is a, c, g, or t
ctcagccctgagaaaggagacatgtaacaagagtaacatgtgtgaaagcagcaaagaggcactggcagaaaacaacctgaaccttccaaagatggctgaaaaaagatggatgcttccaatctggattcaatgaggagacttgcctggtgaaaatcatcactggtcttttggagtttgaggtatacctagagtacctccagaacagatttgagagtagtgaggaacaagccagagctgtgcagatgaagtacaaaagtcctgatccagttcctgcagaaaaaggcaaagaatctagatgcaataaccacccctgacccaaccacaaatgccagcctgctgacgaanctncaggccagaaccagtggctgcaggacatgacaactcatctcattctgcgcactttaaggagttcctgcantccacctgagggctttcggcaaatgtacatgggccctcaaatggtggtggtaatggcattcttntttggcanaaacctgtcccttggcacaaacttatntggtntttttggaaactaaaatntaacgttngacctattttaatattttaaattattaaanttaaaatgngaact

SEQ ID NO: 420 - DNA, 650 bp, Homo sapiens
  misc_feature (376)..(376): n is a, c, g, or t
  misc_feature (378)..(378): n is a, c, g, or t
  misc_feature (424)..(424): n is a, c, g, or t
  misc_feature (472)..(472): n is a, c, g, or t
  misc_feature (487)..(487): n is a, c, g, or t
  misc_feature (493)..(493): n is a, c, g, or t
  misc_feature (519)..(519): n is a, c, g, or t
  misc_feature (521)..(521): n is a, c, g, or t
  misc_feature (539)..(541): n is a, c, g, or t
  misc_feature (544)..(544): n is a, c, g, or t
  misc_feature (553)..(553): n is a, c, g, or t
  misc_feature (581)..(581): n is a, c, g, or t
  misc_feature (583)..(583): n is a, c, g, or t
  misc_feature (594)..(594): n is a, c, g, or t
  misc_feature (603)..(603): n is a, c, g, or t
  misc_feature (608)..(608): n is a, c, g, or t
  misc_feature (614)..(615): n is a, c, g, or t
  misc_feature (619)..(619): n is a, c, g, or t
  misc_feature (627)..(627): n is a, c, g, or t
  misc_feature (632)..(632): n is a, c, g, or t
  misc_feature (639)..(640): n is a, c, g, or t
gccagaggctgttcaccttggagacctgctgcggatatgggtacggcccggcgcgagatttacaccctctcccccggattttcaggggccagcgagagctcaccggacgccgccggaaccgcgacgctttccaagacacgggcccctctctcggggcgaacccattccagggcgccctgcccttcacaaagaaaagagaactctccccggggctcccgccggcttctccgggatcggtcgcgttaccgcactggacgcctcgcggcgcccatctccgccactccggattcggggatctgaacccgactccctttcgatcggccgagggcaacggaggccatcgcccgtcccttcggaacggcgctcgccatctctnangaccgactgacccatgttcaactgctgttcacatggaacccttctncacttcgccttcaaagttctcgtttgaatatttgctactaccaccaanatctgaccttgcggnggttcncccggcccgcgcctagctttaaggtnancgaacggccttctatctnnnggngtacgtccnggggttcggggcgggagcgcggaatcantnacgccggcgcnccttacaantggtntggggnnaaanaaaataancggcnggcctgnnagccaattca

SEQ ID NO: 421 - DNA, 577 bp, Homo sapiens
  misc_feature (317)..(317): n is a, c, g, or t
  misc_feature (365)..(365): n is a, c, g, or t
  misc_feature (415)..(415): n is a, c, g, or t
  misc_feature (445)..(445): n is a, c, g, or t
  misc_feature (467)..(469): n is a, c, g, or t
  misc_feature (472)..(472): n is a, c, g, or t
  misc_feature (474)..(474): n is a, c, g, or t
  misc_feature (488)..(488): n is a, c, g, or t
  misc_feature (494)..(494): n is a, c, g, or t
  misc_feature (497)..(498): n is a, c, g, or t
  misc_feature (502)..(502): n is a, c, g, or t
  misc_feature (522)..(522): n is a, c, g, or t
  misc_feature (527)..(527): n is a, c, g, or t
  misc_feature (534)..(535): n is a, c, g, or t
  misc_feature (544)..(544): n is a, c, g, or t
  misc_feature (549)..(549): n is a, c, g, or t
  misc_feature (551)..(551): n is a, c, g, or t
  misc_feature (555)..(555): n is a, c, g, or t
  misc_feature (557)..(558): n is a, c, g, or t
  misc_feature (574)..(574): n is a, c, g, or t
  misc_feature (576)..(576): n is a, c, g, or t
cgctccccgcccccggagccccgcggacgctacgccgcgacgagtaggagggccgctgcggtgagccttgaagcctagggcgcgggcccgggtggagccgccgcaggtgcagatcttggtggtagtagcaaatattcaaacgagaactttgaaggccgaagtggagaagggttccatgtgaacagcagttgaacatgggtcagtcggtcctgagagatgggcgagcgccgttccgaagggacgggcgatggcctccgttgccctcggcccgatcgaaagggagtcgggttcagatccccgaatccggagtggcgganatgggcgcccgcgaggcgtccagtgcggtaacgcgaccgatcccgganaacccggcgggagccccggggagaagttctcttttctttgtgaagggcanggcgccctggaatgggttcgcccgagagangggcccgtgtcttggaagcgtnnnggntncggcggggtccggngagctnttnntggnccctgaaaatccggggaaanggggnaaatttnngccgggccnacccntntccnannaggtttccaggggaananc

SEQ ID NO: 422 - DNA, 1154 bp, Homo sapiens
  misc_feature (2)..(3): n is a, c, g, or t
  misc_feature (13)..(13): n is a, c, g, or t
  misc_feature (16)..(16): n is a, c, g, or t
  misc_feature (19)..(20): n is a, c, g, or t
  misc_feature (22)..(22): n is a, c, g, or t
  misc_feature (744)..(744): n is a, c, g, or t
  misc_feature (760)..(760): n is a, c, g, or t
  misc_feature (765)..(765): n is a, c, g, or t
  misc_feature (767)..(767): n is a, c, g, or t
  misc_feature (800)..(800): n is a, c, g, or t
  misc_feature (814)..(814): n is a, c, g, or t
  misc_feature (830)..(830): n is a, c, g, or t
  misc_feature (835)..(835): n is a, c, g, or t
  misc_feature (856)..(856): n is a, c, g, or t
  misc_feature (894)..(894): n is a, c, g, or t
  misc_feature (909)..(909): n is a, c, g, or t
  misc_feature (923)..(923): n is a, c, g, or t
  misc_feature (926)..(926): n is a, c, g, or t
  misc_feature (935)..(935): n is a, c, g, or t
  misc_feature (942)..(942): n is a, c, g, or t
  misc_feature (945)..(945): n is a, c, g, or t
  misc_feature (982)..(982): n is a, c, g, or t
  misc_feature (985)..(985): n is a, c, g, or t
  misc_feature (999)..(999): n is a, c, g, or t
  misc_feature (1002)..(1002): n is a, c, g, or t
  misc_feature (1008)..(1008): n is a, c, g, or t
  misc_feature (1011)..(1011): n is a, c, g, or t
  misc_feature (1017)..(1017): n is a, c, g, or t
  misc_feature (1019)..(1019): n is a, c, g, or t
  misc_feature (1051)..(1051): n is a, c, g, or t
  misc_feature (1058)..(1058): n is a, c, g, or t
  misc_feature (1061)..(1061): n is a, c, g, or t
  misc_feature (1070)..(1071): n is a, c, g, or t
  misc_feature (1081)..(1081): n is a, c, g, or t
  misc_feature (1085)..(1085): n is a, c, g, or t
  misc_feature (1091)..(1091): n is a, c, g, or t
  misc_feature (1098)..(1099): n is a, c, g, or t
  misc_feature (1101)..(1103): n is a, c, g, or t
  misc_feature (1116)..(1116): n is a, c, g, or t
  misc_feature (1118)..(1119): n is a, c, g, or t
  misc_feature (1124)..(1124): n is a, c, g, or t
  misc_feature (1126)..(1126): n is a, c, g, or t
  misc_feature (1134)..(1134): n is a, c, g, or t
  misc_feature (1145)..(1146): n is a, c, g, or t
annaaagttgganccnttnntncgactactatagggcgaattgggccctctagatgcatgctcgagcggccgccagtgtgatggatatctgcagaattcgcccttgggattggtggcgacgactcctggagcccgtcagtatcggcggaattccggcttgtgcgtcagggagcagaccaggcaagaaccccaggtggtgatggctccagaggttctgagaaggaacaggcacagggcacactgggacggcacaggaagtgaggctgggggtggccggctgggctgcagggctgcggtgggaagcccagaacaggggcgcaccttgctcagcaggaaaagcccatggggagggggtgagcagggagccagggctctctgaagtgtccaggtgcagggcaaggtgcccacagaccataaggcacttaaatggccacaaagtcatctcagaagagtaatatgacaagtgcctggtctctaaaaagcacaagggtgacctctgcatagaaacagtcccccaccccatcaggctgccagggcaggctcacctggcgtcaaaacgataggatcaggctcccctcggttcccatagtagcaaatgacgtctccctttgctgtgctgcaggccaaggggagagaatgtcagactacagccatagggcgtcctccccgacactgcccggtgatctcacagccctgtttctggaggctagcgatgtgcgcagtaacccgctgcggccaggtcangacttgcaggacccanccctnangtgcctgcagccgggtcatggaggccccaactnttgtccacattacnggtatgttcccaactnacttnggggccaccagcccagaggcncaggatctaaaaggcctcttgcatcccaatcccatggnatggacccacaaagnttgccttgggacanttnagggctganccccttnccncattaccaacttttcattaggcccttaccaaagttanttntaaggtttttgganagnggcccnttngcccangngattaggttcaaaaaaggccaaaaccattttnttacttnaangtaagggcnnttaaaaattngggncttaantggcttnngnnntccttttcccttntnnggaanangggggggnctttttgcccnntttaaacc

SEQ ID NO: 423 - DNA, 861 bp, Homo sapiens
  misc_feature (539)..(539): n is a, c, g, or t
  misc_feature (549)..(549): n is a, c, g, or t
  misc_feature (573)..(573): n is a, c, g, or t
  misc_feature (617)..(617): n is a, c, g, or t
  misc_feature (636)..(636): n is a, c, g, or t
  misc_feature (650)..(651): n is a, c, g, or t
  misc_feature (665)..(665): n is a, c, g, or t
  misc_feature (674)..(674): n is a, c, g, or t
  misc_feature (679)..(679): n is a, c, g, or t
  misc_feature (688)..(688): n is a, c, g, or t
  misc_feature (691)..(691): n is a, c, g, or t
  misc_feature (697)..(697): n is a, c, g, or t
  misc_feature (714)..(714): n is a, c, g, or t
  misc_feature (717)..(717): n is a, c, g, or t
  misc_feature (749)..(750): n is a, c, g, or t
  misc_feature (761)..(762): n is a, c, g, or t
  misc_feature (768)..(769): n is a, c, g, or t
  misc_feature (777)..(777): n is a, c, g, or t
  misc_feature (780)..(780): n is a, c, g, or t
  misc_feature (792)..(792): n is a, c, g, or t
  misc_feature (797)..(800): n is a, c, g, or t
  misc_feature (809)..(809): n is a, c, g, or t
  misc_feature (816)..(816): n is a, c, g, or t
  misc_feature (823)..(824): n is a, c, g, or t
  misc_feature (843)..(843): n is a, c, g, or t
  misc_feature (845)..(845): n is a, c, g, or t
  misc_feature (851)..(851): n is a, c, g, or t
  misc_feature (855)..(855): n is a, c, g, or t
  misc_feature (858)..(858): n is a, c, g, or t
tgtgtgatgtggtattgaggattggaatattttcagctggggagcattttgaactattttctttttaaaaaatgatttatttattttgtagagatggggtcttgctatgttgcccagtctggtttcaaactcctggcctcaagcagtcctccctccttagtctccagattagctgggactataggcatgagtcactatgcccagctctactgtcccttaactattttaaagtgtacacttaacacttgagagtaggaaaatgtggtctttggcgctttctttggaagcctcgatcaccctggggccacactggggccacctgtccagaaaccctcatagatgagctgtggtaaggggcctgatggagaggttggtgatgtggggatggggctcagccctgcagttgtccccatgggcagcctctgtgtgtccatgccatggggcattcggcatggcaggagggcattttagatcctgtgcctcctgggctggtgggccccgaggtgaactgggaacatacccgtgatgctggacaaganctggggcctncatgacccgctgccagcacctgangggctgggtcctgcaagctcctgactggccgaaccggctactgngcacatcggtagcctccanaacaaggctgtganncacccggcatgtcngggaggacnccctntggtggaanctnacattntttccctggcctgaagncancaaagggagacgcatttgctctatgggaaccnngggggacctgnncctatnntttacccnggngaacctccttgnaaccnnnngggtggggncgttttntccaagnnaccttgctttttaaaaccngnctttgnaaanacnttt

SEQ ID NO: 424 - DNA, 442 bp, Homo sapiens
cgcgggattccggtgagaagtatccgcgacgagctatccgggaaagggccgaatgcgatcaaacctaatccgcgagacttgctaaaattctccaagtcccggctgcttatgtacctatcgagccagattcaccaccgtcattatcaactcattttatgaaaaaatgtaatctaaagtatatccttgttgaaaaaaaacaaattaatgtattctttatgaccagtaggagttggacatagcaaaacccaaaaaggagttgggcgcagcaaaaccttgcttcctatcccatgattttgatgatggtgtaagtgttcttccttcatttaacacaggaacgatcaaaatttaaatcttttcatgaaacattattgaactatgatacatttacagtggaacataatgacctagtgctcttcagacttcactggtaaaatactgaggt

SEQ ID NO: 425 - DNA, 529 bp, Homo sapiens
attatttttgacaccagaccaactggtaatggtagcgaccggcgctcagctggttcatatttctcttttccatcatttagcatcaagttcacctcagtattttaccagtgaagtctgaagagcactaggtcattatgttccactgtaaatgtatcatagttcaataatgtttcatgaaaagatttaaattttgatcgttcctgtgttaaatgaaggaagaacacttacaccatcatcaaaatcatgggataggaagcaaggttttgctgcgcccaactcctttttgggttttgctatgtccaactcctactggtcataaagaatacattaatttgttttttttcaacaaggatatactttagattacattttttcataaaatgagttgataatgacggtggtgaatctggctcgataggtacataagcagccgggacttggagaattttagcaagtctcgcggattaggtttgatcgcattcggccctttcccggatagctcgtcgcggatacttctcaccggaatccc

SEQ ID NO: 426 - DNA, 701 bp, Homo sapiens
  misc_feature (665)..(665): n is a, c, g, or t
cggaatccggtggacgccgtgccgttactcgtagtcaggcggcggcgcaggcggcggcggcggcatagcgcacagcgcgccttagcagcagcagcagcagcagcagcatcggaggtacccccgccgtcgcagcccccgcgctggtgcagccaccctcgctccctctgctcttcctcccttcgctcgcaccatggctgatcagctgaccgaagaacagattgctgaattcaaggaagccttctccctatttgataaagatggcgatggcaccatcacaacaaaggaacttggaactgtcatgaggtcactgggtcagaacccaacagaagctgaattgcaggatatgatcaatgaagtggatgctgatggtaatggcaccattgacttccccgaatttttgactatgatggctagaaaaatgaaagatacagatagtgaagaagaaatccgtgaggcattccgagtctttgacaaggatggcaatgggtatatcagtgcagcagaactacgtcacgtcatgacaacttaggagaaaaactaacagatgaagaagtagatgaaatgatcagagaagcagatattgatggagacggacaagtcaactatgaagaattcgtacagatgatgactggcaaatgaagactactttaactccttttcccctntagaagaatcaaattgaatctttacttacctcttgc

SEQ ID NO: 427 - DNA, 375 bp, Homo sapiens; identical to SEQ ID NO: 353

SEQ ID NO: 428 - DNA, 882 bp, Homo sapiens
  misc_feature (512)..(512): n is a, c, g, or t
  misc_feature (559)..(559): n is a, c, g, or t
  misc_feature (591)..(591): n is a, c, g, or t
  misc_feature (620)..(620): n is a, c, g, or t
  misc_feature (635)..(635): n is a, c, g, or t
  misc_feature (656)..(656): n is a, c, g, or t
  misc_feature (659)..(659): n is a, c, g, or t
  misc_feature (673)..(673): n is a, c, g, or t
  misc_feature (681)..(681): n is a, c, g, or t
  misc_feature (703)..(703): n is a, c, g, or t
  misc_feature (714)..(714): n is a, c, g, or t
  misc_feature (720)..(720): n is a, c, g, or t
  misc_feature (734)..(734): n is a, c, g, or t
  misc_feature (759)..(759): n is a, c, g, or t
  misc_feature (772)..(772): n is a, c, g, or t
  misc_feature (774)..(774): n is a, c, g, or t
  misc_feature (776)..(776): n is a, c, g, or t
  misc_feature (788)..(788): n is a, c, g, or t
  misc_feature (790)..(790): n is a, c, g, or t
  misc_feature (795)..(795): n is a, c, g, or t
  misc_feature (802)..(802): n is a, c, g, or t
  misc_feature (805)..(807): n is a, c, g, or t
  misc_feature (809)..(809): n is a, c, g, or t
  misc_feature (811)..(811): n is a, c, g, or t
  misc_feature (814)..(814): n is a, c, g, or t
  misc_feature (825)..(825): n is a, c, g, or t
  misc_feature (863)..(863): n is a, c, g, or t
  misc_feature (881)..(881): n is a, c, g, or t
gcacactggcggccgttactagtggatccgagctcggtaccaagcttgatgcatagcttgagtattctatagtgtcacctaaatagcttggcgtaatcatggtcatagctgtttcctgtgtgaaattgttatccgctcacaattccacacaacatacgagccggaagcataaagtgtaaagcctggggtgcctaatgagtgagctaactcacattaattgcgttgcgctcactgcccgctttccagtcgggaaacctgtcgtgccagctgcattaatgaatcggccaacgcgcggggagaggcggtttgcgtattgggcgctcttccgcttcctcgctcactgactcgctgcgctcggtcgttcggctgcggcgagcggtatcaagctcactcaaaggcggtaatacggttatccacagaatcaggggataacgcaggaaagaacatgtgagcaaaaggccagcaaaaggccaggaaccgtaaaaaggccgcgttgctggcgtttttcatangctccgccccctgacagcattacaaaaatcgacgcttcaagtcagangtggcgaacccgacaggactataaagatccangcgtttcccctggaacttcctcggcgctntctgttcgaccctgncgttaccggaacctgtccgcnttntccttcggaagcgngggctttntatacttacgctgaagtatctnattcggggagncgtcgntcaactggctgggngcacaacccccgttagccgacgtgngcttaccggaatntngntggtcaaccggnanaccantatcgcntgnnnancntgnacagataccancaggtttagggggttcaaatttaaggggccatccgtantaaaaacaatggtttccng

SEQ ID NO: 429 - DNA, 858 bp, Homo sapiens
  misc_feature (549)..(549): n is a, c, g, or t
  misc_feature (569)..(569): n is a, c, g, or t
  misc_feature (688)..(688): n is a, c, g, or t
  misc_feature (719)..(719): n is a, c, g, or t
  misc_feature (771)..(771): n is a, c, g, or t
  misc_feature (776)..(776): n is a, c, g, or t
  misc_feature (788)..(788): n is a, c, g, or t
  misc_feature (797)..(797): n is a, c, g, or t
  misc_feature (800)..(800): n is a, c, g, or t
  misc_feature (822)..(823): n is a, c, g, or t
cagatatccatcacactggcggccgctcgagcatgcatctagagggcccaattcgccctatagtgagtcgtattacaattcactggccgtcgttttacaacgtcgtgactgggaaaaccctggcgttacccaacttaatcgccttgcagcacatccccctttcgccagctggcgtaatagcgaagaggcccgcaccgatcgcccttcccaacagttgcgcagcctgaatggcgaatggacgcgccctgtagcggcgcattaagcgcggcgggtgtggtggttacgcgcagcgtgaccgctacacttgccagcgccctagcgcccgctcctttcgctttcttcccttcctttctcgccacgttcgccggctttccccgtcaagctctaaatcgggggctccctttagggttccgatttaatgctttacggcacctcgaccccaaaaaacttgattaagggtgatggttacgtagtgggccatcgccctgatagacgggttttcgccctttgacgttggagtccacgttctttaatagtggactcttggtncaactgggacaacacttaancctatctcggctattcttttgattataagggatttggcgattcgggctattggttaaaaaagactgattaacaaaatttaacgcgaatttacaaattcaggcccaaggctgtaaggaancgacactaaaagccatccgaaaacgggttancccgataaaggaactatgggttttgggaaaggaaaccaacccaaaaaagcgnacttnaagggctactgnaaagtaaanggngttatgaagaacaacgatgcannggcccttgaagtggaacccgaaaaatgaggttttg

SEQ ID NO: 430 - DNA, 836 bp, Homo sapiens
  misc_feature (406)..(406): n is a, c, g, or t
  misc_feature (487)..(487): n is a, c, g, or t
  misc_feature (503)..(503): n is a, c, g, or t
  misc_feature (563)..(563): n is a, c, g, or t
  misc_feature (575)..(575): n is a, c, g, or t
  misc_feature (607)..(607): n is a, c, g, or t
  misc_feature (619)..(619): n is a, c, g, or t
  misc_feature (633)..(633): n is a, c, g, or t
  misc_feature (663)..(663): n is a, c, g, or t
  misc_feature (667)..(667): n is a, c, g, or t
  misc_feature (671)..(671): n is a, c, g, or t
  misc_feature (684)..(684): n is a, c, g, or t
  misc_feature (688)..(688): n is a, c, g, or t
  misc_feature (697)..(697): n is a, c, g, or t
  misc_feature (727)..(727): n is a, c, g, or t
  misc_feature (731)..(731): n is a, c, g, or t
  misc_feature (740)..(743): n is a, c, g, or t
  misc_feature (751)..(751): n is a, c, g, or t
  misc_feature (763)..(763): n is a, c, g, or t
  misc_feature (768)..(770): n is a, c, g, or t
  misc_feature (773)..(773): n is a, c, g, or t
  misc_feature (779)..(779): n is a, c, g, or t
  misc_feature (782)..(782): n is a, c, g, or t
  misc_feature (784)..(784): n is a, c, g, or t
  misc_feature (790)..(790): n is a, c, g, or t
  misc_feature (796)..(796): n is a, c, g, or t
  misc_feature (799)..(799): n is a, c, g, or t
  misc_feature (803)..(803): n is a, c, g, or t
  misc_feature (806)..(806): n is a, c, g, or t
  misc_feature (824)..(824): n is a, c, g, or t
  misc_feature (828)..(828): n is a, c, g, or t
  misc_feature (834)..(835): n is a, c, g, or t
gtggttttgctttgttcttactaggttttggtgccaccttccctgcctgcgcttgtgccccctctcctccttggcactggcggcctccttgcctcccttccacccgtgctgccatcccgtgcctgtcgtgttggttcttcacacgtgctctgttctcggggttgttccattcatgccttcttggagggtgagggtggcttgggaaccgacccagtgatcatgcctactttcttctttgtatctccctccttcccagcccacccgggcagcagactctgatggaaggaaggtgccgtaggtgggcttttagaaactaacgggactggttttcaaagcagttatcttgggaaactgtttattccagcgatgtgacttttttcagaatatttcttggaatcatattcanagtctggggctgtgtgttgagcagccttaaggatgctagacactcatttagtgcccaaggagtccagcgaatgacgtctgnggcaacgaggctcagngcaagcaaaaggaccatttaaagtaaatacttggatcaatctgtgactcttaaatggctnaaaagaatttgnattcaaaagggttgaaccctggcacgttggcntgggagctatancttgatccttgganaaaaattcattggtggggaactgattggtngganaaantggctggtacttntggnatccaggtntgacttacagggaaaaaaaaaaaacgcgantganggtcagatnnnncccatcanccattcaccatngggcnnntanggtccnccngncaactnagcaantgnattnatnggcccaaaactgggaacnggcnatttcnng

SEQ ID NO: 431 - DNA, 856 bp, Homo sapiens
  misc_feature (473)..(473): n is a, c, g, or t
  misc_feature (573)..(573): n is a, c, g, or t
  misc_feature (616)..(616): n is a, c, g, or t
  misc_feature (619)..(619): n is a, c, g, or t
  misc_feature (622)..(622): n is a, c, g, or t
  misc_feature (656)..(656): n is a, c, g, or t
  misc_feature (658)..(658): n is a, c, g, or t
  misc_feature (665)..(665): n is a, c, g, or t
  misc_feature (668)..(668): n is a, c, g, or t
  misc_feature (671)..(671): n is a, c, g, or t
  misc_feature (677)..(677): n is a, c, g, or t
  misc_feature (693)..(693): n is a, c, g, or t
  misc_feature (729)..(729): n is a, c, g, or t
  misc_feature (740)..(740): n is a, c, g, or t
  misc_feature (751)..(751): n is a, c, g, or t
  misc_feature (754)..(754): n is a, c, g, or t
  misc_feature (758)..(759): n is a, c, g, or t
  misc_feature (763)..(763): n is a, c, g, or t
  misc_feature (801)..(801): n is a, c, g, or t
  misc_feature (815)..(815): n is a, c, g, or t
  misc_feature (824)..(824): n is a, c, g, or t
  misc_feature (829)..(829): n is a, c, g, or t
  misc_feature (840)..(840): n is a, c, g, or t
  misc_feature (849)..(849): n is a, c, g, or t
gcccctggtaaaagtcagaacctgggatgaccagaaagtaacaggacagatttctcccagcaaatcagtctccacaaccaaatgaatattgttctccaaggagtcaagctatagactcacaatgacaacgtggccatggctcaaaacactctctgaaattacaaaattgctttctgagccaatttaagagtcacatgattgaatccaagctattttactttaaatggtccttttgctttgcacctgagacctcgcttggccacagacgtcattcgctggactccctgggcactaaatgagtgtctagcatccttaaggctgctcaacacacagccccagactctgaatatgattccaagaaatattctgaaaaaagtcacatcgctggaataaacagtttcccaagataactgctttgaaaaccagtcccgttagtttctaaaagcccacctacggcaccttccttccatcanagtctgctgcccgggtgggctgggaaggagggagatacaaagaagaaagtaggcatgatcactgggtcggttcccaagccccctcacccttcaagaaggnatgaatggacaaccccgagaacagagccgtgtgaagaccaccnacngcncggatggcacacggtggaaggaggcaggaggccncngtgccanganganagggcncaacccagccggaagnggcccaaacctatagaacaagcaaaccccggattcngtgacgcggcntacctaccatnggngggnnaaanatataccggcggctgcagccaattgaaatcataactgnggcgtcactgcttnaggccattncctanggggataaatntgcgggttnacgggcg

SEQ ID NO: 432 - DNA, 828 bp, Homo sapiens
  misc_feature (483)..(483): n is a, c, g, or t
  misc_feature (535)..(535): n is a, c, g, or t
  misc_feature (585)..(585): n is a, c, g, or t
  misc_feature (595)..(595): n is a, c, g, or t
  misc_feature (630)..(630): n is a, c, g, or t
  misc_feature (636)..(636): n is a, c, g, or t
  misc_feature (640)..(640): n is a, c, g, or t
  misc_feature (681)..(681): n is a, c, g, or t
  misc_feature (689)..(689): n is a, c, g, or t
  misc_feature (694)..(694): n is a, c, g, or t
  misc_feature (711)..(711): n is a, c, g, or t
  misc_feature (789)..(789): n is a, c, g, or t
agaaatcttttaatgtttattcaaaggacaaaataaagactatgaaccaatgagacacatagtaaaaaagtacaattttaatatagtgaatgtaatatatatgtaattactcataacaaaatggtcaaaacctttaaaagatacacaataggcatctaaaaagctcagcaatgctaaatatataatatatattatatataaatatataatatataaatacatacgtttttaccaagaaatgttttatttttcttgcagtagctttgttaattgcacaaaattatgttttgtttttgccatttaaatattatcacagaatcctattctgaaagacaaatgttcattaaaaacaaagcaaaaatagaaattcacaaccattaattacctaggtttgtcatttaaaggtttaaagaaaaaaagggaggagctttcctacaagccttttccaagtgtcacattttctctttaaaagggaaggatttncaaacaaaggtgaaatagcttaaacagaaatatttgtaaaaataaactttangcattatcaaggatattaagacacactgactaacccggttcattacccgnatcttccccnccccaccccagtgggtccaccaggactagaacagntttacnttanacagaaatgcttcaaatcccagggaaagaactggctaaaanccgcaggnttttnctgcctcccgtgccgtngttttgaatctttaccaggtttcttggaagggccaactggagtgggaggactgccacgggccctttttatatggatcntgggccgcgtccttcagtggtggggaaaaaaaacggggc

SEQ ID NO: 433 - DNA, 414 bp, Homo sapiens
  misc_feature (250)..(250): n is a, c, g, or t
  misc_feature (262)..(262): n is a, c, g, or t
  misc_feature (266)..(267): n is a, c, g, or t
  misc_feature (270)..(270): n is a, c, g, or t
  misc_feature (272)..(272): n is a, c, g, or t
  misc_feature (275)..(275): n is a, c, g, or t
  misc_feature (284)..(284): n is a, c, g, or t
  misc_feature (298)..(298): n is a, c, g, or t
  misc_feature (300)..(300): n is a, c, g, or t
  misc_feature (303)..(303): n is a, c, g, or t
  misc_feature (309)..(309): n is a, c, g, or t
  misc_feature (322)..(322): n is a, c, g, or t
  misc_feature (326)..(326): n is a, c, g, or t
  misc_feature (344)..(345): n is a, c, g, or t
  misc_feature (370)..(370): n is a, c, g, or t
  misc_feature (373)..(373): n is a, c, g, or t
  misc_feature (377)..(377): n is a, c, g, or t
  misc_feature (391)..(391): n is a, c, g, or t
  misc_feature (400)..(401): n is a, c, g, or t
  misc_feature (407)..(407): n is a, c, g, or t
  misc_feature (410)..(410): n is a, c, g, or t
ataattatatataaggtggccacgctggggcaagttccctccccactcacagctttggcccctttcacagagtagaacctgggttagaggattgcagaagacgagcggcagcggggagggcagggaagatgcctgtcgggtttttagcacagttcatttcactgggattttgaagcatttctgtctgaatgtaaagcctgttctagtcctggtgggacacactggggttgggggtgggggaagatgcggnaatgaaaccggntagnnagngntgncttaatatncttgataatgctgnanagnttattnttacaaatatttntgtntaagctatttcacctttnnttggaaatccttcccttttaaaganaanatgngacactttgtgaanaggcttgtnngaaagntcntccc

SEQ ID NO: 434 - DNA, 866 bp, Homo sapiens
  misc_feature (509)..(509): n is a, c, g, or t
  misc_feature (550)..(550): n is a, c, g, or t
  misc_feature (553)..(553): n is a, c, g, or t
  misc_feature (650)..(650): n is a, c, g, or t
  misc_feature (666)..(666): n is a, c, g, or t
  misc_feature (677)..(677): n is a, c, g, or t
  misc_feature (684)..(684): n is a, c, g, or t
  misc_feature (693)..(694): n is a, c, g, or t
  misc_feature (700)..(700): n is a, c, g, or t
  misc_feature (720)..(720): n is a, c, g, or t
  misc_feature (724)..(724): n is a, c, g, or t
  misc_feature (729)..(729): n is a, c, g, or t
  misc_feature (732)..(732): n is a, c, g, or t
  misc_feature (745)..(746): n is a, c, g, or t
  misc_feature (752)..(753): n is a, c, g, or t
  misc_feature (767)..(767): n is a, c, g, or t
  misc_feature (774)..(774): n is a, c, g, or t
  misc_feature (776)..(776): n is a, c, g, or t
  misc_feature (791)..(791): n is a, c, g, or t
  misc_feature (820)..(820): n is a, c, g, or t
  misc_feature (845)..(845): n is a, c, g, or t
  misc_feature (847)..(847): n is a, c, g, or t
  misc_feature (860)..(861): n is a, c, g, or t
  misc_feature (864)..(864): n is a, c, g, or t
  misc_feature (866)..(866): n is a, c, g, or t
aagaaatatgggactatgtgaaaagaccaaatctacgtctgattggtgtacctgaaagtgatgtggagaatggaaccaagttggaaaacactctgcaggatattatccaggagaacttccccaatctagcaaggcaggccaacgttcagattcaggaaatacagagaacgccacaaagatactcctcgagaagagcaattccaagacacataattgtcagattcaccaaagttgaaatgaaggaaaaaatgttaagggcagccagagagaaaggtcaggttaccctcaaaggaaagcccatcagactaacagcggatctctcggcagaaaccctacaagccagaagagagtgggggccaatattcaacattcttaaagaaaagaattttcaacccagaatttcatatccagccaaactaagcttcataagtgaaggagaaataaaatactttatagacaagcaaatgctgagagattttgtcaacaccaggcctgccctaaaagagctnctgaaggaagcgctaaacatggaaaggaacaccggtaccancgntgcaaaatcatgccaaatgtaaagacctcgagactaggaagaactgctcactaacgagcaaatcccagcttacatcttatgacgggtcaattccccntacatatactttaatntaatggctaantctgcantaaaagacnngactgnagttggtaagagcagacctnatgngttgntcngaaccattactgnnaacccnnggtcaataaggtgnaagattncngcctggaacaaaagngggtggatctacttgtaaccgctttaccncaaacaaaaacaaaggcttctttgnanggtcatcccaagnntcntn

SEQ ID NO: 435 - DNA, 829 bp, Homo sapiens
  misc_feature (476)..(476): n is a, c, g, or t
  misc_feature (522)..(522): n is a, c, g, or t
  misc_feature (530)..(530): n is a, c, g, or t
  misc_feature (544)..(544): n is a, c, g, or t
  misc_feature (562)..(562): n is a, c, g, or t
  misc_feature (664)..(664): n is a, c, g, or t
  misc_feature (679)..(679): n is a, c, g, or t
  misc_feature (743)..(743): n is a, c, g, or t
  misc_feature (757)..(757): n is a, c, g, or t
  misc_feature (767)..(767): n is a, c, g, or t
  misc_feature (780)..(780): n is a, c, g, or t
  misc_feature (785)..(785): n is a, c, g, or t
  misc_feature (803)..(803): n is a, c, g, or t
  misc_feature (805)..(805): n is a, c, g, or t
  misc_feature (811)..(813): n is a, c, g, or t
  misc_feature (815)..(815): n is a, c, g, or t
gttctgtagatgtctattaggtccgcttggtgcagagctgagttcaattcctgggtatccttgttgactttctgtctcgttgatctgtctaatgttgacagtggggtgttaaagtctcccattattaatgtgtgggagtctaagtctctttgtaggtcactcaggacttgctttatgaatctgggtgctcctgtattgggtgcataaatatttaggataagttagctcctcttgttgaattgatccctttaccattatgtaatggccttctttgtctcttttgatctttgttggtttaaagtctgttttatcagagactaggattgcaacccctgcctttttttgttttccattggcttggtagatctttctccatccttttattttgagcctatgtgtgtctctgcacgtgagatgggtttcctgaatacagcacactgatgggtcttgactctttatccaacttgccagtctgngtcttttaattgcagaatttagtccatttatatttaaaggtaatantggtatgngtgaattgatctgncattatgatgtagctggngatttgctcgtagttgatgcagttcttctagctcatggcttacatttggcatgatttgcacggtggaccggtggtcctttcatgttaaccttcttcagagcntttaggcaggctggngtgacaaaacttaacatttgctggcataagattattctcttacttataacttattggtggaatnaatctggtgaaatntttttaaaantgaaatggccccnttttnggttgaggttttccaaancnttaacnnngnttcttaggaccccg

SEQ ID NO: 436 - DNA, 840 bp, Homo sapiens
  misc_feature (539)..(539): n is a, c, g, or t
  misc_feature (542)..(542): n is a, c, g, or t
  misc_feature (549)..(549): n is a, c, g, or t
  misc_feature (559)..(559): n is a, c, g, or t
  misc_feature (599)..(599): n is a, c, g, or t
  misc_feature (738)..(738): n is a, c, g, or t
  misc_feature (766)..(766): n is a, c, g, or t
  misc_feature (781)..(781): n is a, c, g, or t
  misc_feature (784)..(784): n is a, c, g, or t
  misc_feature (794)..(794): n is a, c, g, or t
  misc_feature (798)..(798): n is a, c, g, or t
  misc_feature (805)..(805): n is a, c, g, or t
  misc_feature (816)..(817): n is a, c, g, or t
  misc_feature (824)..(824): n is a, c, g, or t
  misc_feature (831)..(831): n is a, c, g, or t
ctttaaagtagttttttccaattcagtgaagaaagtcattggtagcttgatggggatggcattgaatctataaattaccttgggcagtatggccattttcatgatattgattcttcctacccatgagcatggaatgttcttccatttgtttgtatcctcttttatttccttgagcagtggtttgtagttctccttgaagaggtccttcacatcccttgtaagttggattcctaggtattttattctctttgaagcaattgtgaatgggagttcactcatgatttggctctctgtttgtctgtcgttggtgtataagaatgcttgtgatttttgtacattgattttgtatcctgagactttgctgaagttgcttatcagcttatggagattttgggctgagacaatggggttttctagatatacaatcatgtcgtctgcaaacagggacaatttgacttcctcttttcctaattgaataccctttatttcttctcctgcctaattgccctggccagaactttcaacactatgttgaatangantggtganaaaagacatncctgcttgggccagtttcaaaggaatgcttccagttttgncattcatatgatatggctgggggttggcacaaaactcttatatttgaaaaccgtccacataccaattatgaaagtttaactgaaggtggtgaatttgcaaagctttttgcacaatgaaaaacatgggtttgcttgcctntaatccgatacatatgatggaattgacnactgctccaggatanccntgactggggnaacnttaaggngtgatcgtgcnntttttgngattgcnaagcccagg

SEQ ID NO: 437 - DNA, 838 bp, Homo sapiens
  misc_feature (591)..(591): n is a, c, g, or t
  misc_feature (628)..(628): n is a, c, g, or t
  misc_feature (688)..(688): n is a, c, g, or t
  misc_feature (696)..(696): n is a, c, g, or t
  misc_feature (736)..(736): n is a, c, g, or t
  misc_feature (738)..(738): n is a, c, g, or t
  misc_feature (743)..(743): n is a, c, g, or t
  misc_feature (746)..(746): n is a, c, g, or t
  misc_feature (751)..(751): n is a, c, g, or t
  misc_feature (766)..(766): n is a, c, g, or t
  misc_feature (773)..(773): n is a, c, g, or t
  misc_feature (813)..(813): n is a, c, g, or t
  misc_feature (819)..(819): n is a, c, g, or t
  misc_feature (827)..(828): n is a, c, g, or t
  misc_feature (836)..(836): n is a, c, g, or t
gagaaaatctagaagaaatggataaattcctcgacacatacactctcccaacactaaaccaggaagaagttgaatctctgaatagaccaataacaggatctgaaattgtggcaacaatcaatagcttactaaccaaaaagagtccaggaccagatggattcacagccgaattctaccagaggtataaggaggagctggtaccactccttctgaaactattccaatcaatagaaaaagagagaatccttcctaactcattttatggggccagcatcattctgataacaaagccgggcagagacacaaccaaaaaagagaattttagaccaatatccttgatgaacattgatgcaaaaatcctcaataaaatactggcaaaccgaatccagcagcacatcaaaaagcttatccaccatgatcaagtgggcttcatccctgggatgcaagactggtcaatatatgcaaatcaataaatgtaatccagcatataaacagagcccaagacaaaaaccacatgattatctcaatagatgcagaaaaagcctttgacaaaattcaacacccttcatgctaaaaactctcaataattangtatgatggacgtatttcaaataataagagctattgngacaaccccagccattctactgatggcaaactgggagcattccttgaaactggacagacnggtgcttntacactctatcactagggtgaagttggcaggcatagcggnangatanggntcatnggaaaaggagcaatnctgttgnacaatgtgtttaaaaccctggtaccaattctacgtacatngaactngtcaatanncaatcagntt

SEQ ID NO: 438 - DNA, 850 bp, Homo sapiens
  misc_feature (387)..(387): n is a, c, g, or t
  misc_feature (477)..(477): n is a, c, g, or t
  misc_feature (512)..(512): n is a, c, g, or t
  misc_feature (540)..(540): n is a, c, g, or t
  misc_feature (611)..(611): n is a, c, g, or t
  misc_feature (653)..(653): n is a, c, g, or t
  misc_feature (655)..(655): n is a, c, g, or t
  misc_feature (669)..(669): n is a, c, g, or t
  misc_feature (678)..(678): n is a, c, g, or t
  misc_feature (689)..(689): n is a, c, g, or t
  misc_feature (704)..(704): n is a, c, g, or t
  misc_feature (709)..(709): n is a, c, g, or t
  misc_feature (714)..(714): n is a, c, g, or t
  misc_feature (760)..(760): n is a, c, g, or t
  misc_feature (774)..(774): n is a, c, g, or t
  misc_feature (776)..(776): n is a, c, g, or t
  misc_feature (783)..(783): n is a, c, g, or t
  misc_feature (793)..(793): n is a, c, g, or t
  misc_feature (801)..(801): n is a, c, g, or t
  misc_feature (806)..(806): n is a, c, g, or t
  misc_feature (808)..(808): n is a, c, g, or t
  misc_feature (813)..(813): n is a, c, g, or t
tgtaatcccagcacgttggaaggttgaggcgggtagatcatgaggtcaggaattcaagatcagcctggccgggatggtgaaaccccatctctactaaaaatacaaaaattagccaggtgtagtggtgggcgcctgtggtcccagctactatggtggctgaggtgcgagagtcgcttgaacctgggagatggaggttgcagtgagccaagatcgtaccactgcactccagcctgggcaacagaacaagactccatttcaaaaaaagaaaattcttatttgccatgagccgaggaatgcacaggtactaactagatggtgtggacagctgacgcaaactgggcatatacaatgggacacacctgtactaggatgaaaggcacagcctanagggctggcaggtgttgggtaatgctcaagtttcagagtgatggcagaagagtaggttggtaggccctcatggctctgcttggcagcacngagttccgcggaattccgccatctgacggctccangagtcgtcgcccaatccaagccgaattncacacactggcggccgtactagtggatccgactcggaccaacttgatgcataacttgagtattctatatgncacctaaatagcttggcgtaatcatggcatacttgtttctgngngaaattgtatccgntacaattcncacacatacanccgaagcataagtgnaagcnggggngcctaatgagtgactactacttattgggtggctactgccgtttcancggaaactgctgcnantcttatnatcgccaccncgggaagnggtgngntggcntttcctctgtattatctgctgcttggtgggaacggta

SEQ ID NO: 439 - DNA, 483 bp, Homo sapiens
cggaactccgtgctgccaagcagagccatgagggcctaccaacctactcttctgccatcactctgaaacttgagcattacccaacacctgccagccctctaggctgtgcctttcatcctagtacaggtgtgtcccattgtatatgcccagtttgcgtcagctgtccacaccatctagttagtacctgtgcattcctcggctcatggcaaataagaattttctttttttgaaatggagtcttgttctgttgcccaggctggagtgcagtggtacgatcttggctcactgcaacctccatctcccaggttcaagcgactctcgcacctcagccaccatagtagctgggaccacaggcgcccaccactacacctggctaatttttgtatttttagtagagatggggtttcaccatcccggccaggctgatcttgaattcctgacctcatgatctacccgctcaccttccaacgtgctgggattaca

SEQ ID NO: 440 - DNA, 449 bp, Homo sapiens
ctgtttaattaaaacaaagcatcgcgaaggcccgcggcgggtgttgacgcgatgtgatttctgcccagtgctctgaatgtcaaagtgaagaaattcaatgaagcgcgggtaaacggcgggagtaactatgactctcttaaggtagccaaatgcctcgtcatctaattagtgacgcgcatgaatggatgaacgagattcccactgtccctacctactatccagcgaaaccacagccaagggaacgggcttggcggaatcagcggggaaagaagaccctgttgagcttgactctagtctggcacggtgaagagacatgagaggtgtagaataagtgggaggcccccggcgcccccccggtgtccccgcgaggggcccgggcggggtccgccggccctgcagccgccggtgaaataccactactctgatcgttttttcactgacccggtgag

SEQ ID NO: 441 - DNA, 450 bp, Homo sapiens
ctcaccgggtcagtgaaaaaacgatcagagtagtggtatttcaccggcggcctgcagggccggcggaccccgccccgggcccctcgcggggacaccgggggggcgccgggggcctcccacttattctacacctctcatgtctcttcaccgtgccagactagagtcaagctcaacagggtcttctttccccgctgattccgccaagcccgttcccttggctgtggtttcgctggatagtaggtagggacagtgggaatctcgttcatccattcatgcgcgtcactaattagatgacgaggcatttggctaccttaagagagtcatagttactcccgccgtttacccgcgcttcattgaatttcttcactttgacattcagagcactgggcagaaatcacatcgcgtcaacacccgccgcgggccttcgcgatgctttgttttaattaaaca

SEQ ID NO: 442 - DNA, 517 bp, Homo sapiens
  misc_feature (110)..(110): n is a, c, g, or t
  misc_feature (169)..(169): n is a, c, g, or t
  misc_feature (265)..(265): n is a, c, g, or t
  misc_feature (300)..(300): n is a, c, g, or t
  misc_feature (509)..(509): n is a, c, g, or t
  misc_feature (516)..(516): n is a, c, g, or t
cccatttaacttttttaatgggtctcaaaattctgtgacaaatttttggtcaagttgtttccattaaaaagtactgattttaaaaactaataacttaaaactgccacacncaaaaaagaaaaccaaagtggtccacaaaacattctcctttccttctgaagggtttacnatgcattggtatcattaaccagtcttttactactaaacttaaatggccaattgaaacaaacagttctgagaccgttcttccaccactgattaagantggggtggcaggtattagggataatattcatttanccttctgagctttctgggcagacttggtgaccttgccagctccagcagccttcttgtccactgctttgatgacacccaccgcaactgtctgtctcatatcacgaacagcaaagcgacccaaaggtggatagtctgaaaagctctcaacacacatgggcttgccaggaaccatatcaacaatggcagcatcccagacttcaagaatttanggccatnt

SEQ ID NO: 443 - DNA, 519 bp, Homo sapiens
  misc_feature (511)..(511): n is a, c, g, or t
agatggccctaaattcttgaagtctggtgatgctgccattgttgatatggttcctggcaagcccatgtgtgttgagagcttctcagactatccacctttgggtcgctttgctgttcgtgatatgagacagacagttgcggtgggtgtcatcaaagcagtggacaagaaggctgctggagctggcaaggtcaccaagtctgcccagaaagctcagaaggctaaatgaatattatccctaatacctgccaccccactcttaatcagtggtggaagaacggtctcagaactgtttgtttcaattggccatttaagtttaagtagtaaaagactggttaatgataacaatgcatcgtaaaaccttcagaaggaaaggagaatgttttgtggaccactttggttttcttttttgcgtgtggcagttttaagttattagtttttaaaatcagtactttttaatggaaacaacttgaccaaaaatttgtcacagaattttgagacccattaaaaaagntaaatggg

SEQ ID NO: 444 - DNA, 873 bp, Homo sapiens
  misc_feature (553)..(553): n is a, c, g, or t
  misc_feature (562)..(562): n is a, c, g, or t
  misc_feature (616)..(616): n is a, c, g, or t
  misc_feature (644)..(644): n is a, c, g, or t
  misc_feature (659)..(659): n is a, c, g, or t
  misc_feature (663)..(663): n is a, c, g, or t
  misc_feature (693)..(693): n is a, c, g, or t
  misc_feature (708)..(708): n is a, c, g, or t
  misc_feature (723)..(723): n is a, c, g, or t
  misc_feature (788)..(788): n is a, c, g, or t
  misc_feature (790)..(790): n is a, c, g, or t
  misc_feature (795)..(795): n is a, c, g, or t
  misc_feature (797)..(797): n is a, c, g, or t
  misc_feature (799)..(799): n is a, c, g, or t
  misc_feature (822)..(822): n is a, c, g, or t
  misc_feature (843)..(843): n is a, c, g, or t
  misc_feature (862)..(862): n is a, c, g, or t
  misc_feature (872)..(872): n is a, c, g, or t
ctgggctctgggctagtactggggagtatctgcagaatcccgtgatatgatccgtcttcagctaaagatattatttcacaagtggaatgacagctgacttctcaacaacaacgaaagcaaggagacagttgaaagacatcttgaaaatggaattagcagttcacaaagcacattcgcatataagggcttgttttgaattgatcttggcagcaattctatgaaacaagtaaaagcacaagaggaataggaactgcacctcttccttcagtttcagcttgaataatatcaggaagattcgtatcggtctgagttgggtcacgtacccgacgtgctatagctgaggatggggtaagctgattggagtttgcaacactgttcacagagccaagatatggaaagaacctaaatgtcaactggtggatgaatggataaagaaattgtggtatatacatacactggaatattattcaaccttaaaaagaaggaaatcctaacatttgtgacaacatggatggacctggagggaattatgctgagtgaaataagacagacncaaaagacntttcttgcaggagctccttatatgtggaatctaaatagtcagcttaaagaaganagtaaactactggtgtcaggagcagganaaaatggaaatgaanaggngatagtaaagggacaaagttcagtatcaanataataagttctggnggttactattaatantccatagacctataataccatactggttggtactaaaatgctaaagggtttctaatgtctaccananaaaanananggaaaataagggcggaggccctnaaagggaggatgtatgcctgnggggaaggtctgaaatctncccactatgng

SEQ ID NO: 445 - DNA, 832 bp, Homo sapiens
  misc_feature (220)..(220): n is a, c, g, or t
  misc_feature (416)..(416): n is a, c, g, or t
  misc_feature (424)..(424): n is a, c, g, or t
  misc_feature (458)..(458): n is a, c, g, or t
  misc_feature (525)..(525): n is a, c, g, or t
  misc_feature (545)..(545): n is a, c, g, or t
  misc_feature (586)..(586): n is a, c, g, or t
  misc_feature (638)..(638): n is a, c, g, or t
  misc_feature (664)..(664): n is a, c, g, or t
  misc_feature (670)..(671): n is a, c, g, or t
  misc_feature (687)..(687): n is a, c, g, or t
  misc_feature (690)..(690): n is a, c, g, or t
  misc_feature (703)..(703): n is a, c, g, or t
  misc_feature (727)..(727): n is a, c, g, or t
  misc_feature (732)..(732): n is a, c, g, or t
  misc_feature (771)..(771): n is a, c, g, or t
  misc_feature (773)..(773): n is a, c, g, or t
  misc_feature (776)..(776): n is a, c, g, or t
  misc_feature (781)..(781): n is a, c, g, or t
  misc_feature (797)..(797): n is a, c, g, or t
  misc_feature (799)..(799): n is a, c, g, or t
  misc_feature (804)..(804): n is a, c, g, or t
  misc_feature (807)..(807): n is a, c, g, or t
  misc_feature (823)..(823): n is a, c, g, or t
  misc_feature (828)..(828): n is a, c, g, or t
gacatacaaaaagctgtacatatttaatatttacatctcaattagtttggggataagtatactctcatgaaaccatcaccaccatcaaggccataaacatatccatcaccttttgaagtgtcctcctgccccttaattattaccattattattattattattggtaagaacatataagatataccctcttagcaattttaagtatacaatacagtattgntacttataggtactatgtgatatattaatagtaaacctccagaacttatttatcttgtataactgaaactttgtaccctttaactatcacctcttcatttccacttttctcctgctcctgacaaccagtagtctactctcttctttaagcttgactattttagattccacatataagtgagctcctgcaagaaagnctttttgngtctgcttatttcactcagcataattccctccangtccatccatgttgtccaaatggtaggatttccttctttttaaggtgaataatattccagtgtatgnatataccacaatttcttatncattcttcaccagtgacattaaggtctttctatcttggctntgggaacagggtgcaaactccaatcaacttacccatcctaactatagacgtnggtacggacccactaaacgaacgaanttctgnntattaactgaactganganaggggagtccatncttggctttactggtcaaaaatgnggcanacaataaaaaccttttgcaagggttgggacgtatcattnanagnttacnggtctgttctgggtgnancattntcntggaaattttgcgaanggcantcgg

SEQ ID NO: 446 - DNA, 436 bp, Homo sapiens
cttttatttgctgagatattgttctaatccactgagtcagatttggttggtctgaaaaatttaacctgttgttaaaaatatttcttggaggaagcagcagaggaataacagtattactcaagcattcacaaagggggcaaaggaattctccgttttctacatcatagctcgtatgtaagcgtaatctctgttgccttcgctgttctttagcttgaacggaatcaaaatacctttgccaacaatgggcatgcataatgtgcccacagctactagtgtgtgttccacaagacagatcagggtgcatgaataatggatcatatttttctggatcttgaataaatttacttctgttttttgataatacagttgatctctgaacaaatgctgccaagaccattgccctgctttccactttaacttcttgctcctcttgaca

SEQ ID NO: 447 - DNA, 944 bp, Homo sapiens
  misc_feature (535)..(535): n is a, c, g, or t
  misc_feature (561)..(561): n is a, c, g, or t
  misc_feature (599)..(599): n is a, c, g, or t
  misc_feature (615)..(615): n is a, c, g, or t
  misc_feature (621)..(621): n is a, c, g, or t
  misc_feature (627)..(627): n is a, c, g, or t
  misc_feature (673)..(673): n is a, c, g, or t
  misc_feature (685)..(685): n is a, c, g, or t
  misc_feature (748)..(748): n is a, c, g, or t
  misc_feature (751)..(751): n is a, c, g, or t
  misc_feature (761)..(761): n is a, c, g, or t
  misc_feature (763)..(764): n is a, c, g, or t
  misc_feature (769)..(769): n is a, c, g, or t
  misc_feature (773)..(774): n is a, c, g, or t
  misc_feature (779)..(779): n is a, c, g, or t
  misc_feature (796)..(797): n is a, c, g, or t
  misc_feature (801)..(801): n is a, c, g, or t
  misc_feature (812)..(812): n is a, c, g, or t
  misc_feature (819)..(819): n is a, c, g, or t
  misc_feature (821)..(821): n is a, c, g, or t
  misc_feature (824)..(824): n is a, c, g, or t
  misc_feature (831)..(831): n is a, c, g, or t
  misc_feature (836)..(837): n is a, c, g, or t
  misc_feature (849)..(849): n is a, c, g, or t
  misc_feature (860)..(860): n is a, c, g, or t
  misc_feature (868)..(868): n is a, c, g, or t
  misc_feature (878)..(878): n is a, c, g, or t
  misc_feature (886)..(886): n is a, c, g, or t
  misc_feature (904)..(904): n is a, c, g, or t
  misc_feature (906)..(906): n is a, c, g, or t
  misc_feature (915)..(915): n is a, c, g, or t
  misc_feature (918)..(918): n is a, c, g, or t
  misc_feature (920)..(920): n is a, c, g, or t
  misc_feature (925)..(925): n is a, c, g, or t
  misc_feature (931)..(931): n is a, c, g, or t
  misc_feature (936)..(936): n is a, c, g, or t
  misc_feature (938)..(938): n is a, c, g, or t
  misc_feature (942)..(942): n is a, c, g, or t
gtggcttggaggggttaagagacttatcaaagatcttggggctaggtagtagaaaaacagaaaaaaaatcaggtttttcaactgcagtcagtacttttttaacaaattaaaatatatcaaatctgtttctcctaggtacctaaaggcctaaaaatccatcaacacagggatatatattagaaaaccataccaagataaaatgcaaaggtcaagaaaatagaaatgttaaaactccttttgtatgtcatgtatttccacagttttgtggtgaagaagtatgaatttagggaactggatactagagagaaaggaatcatctcccttcacttgctaaggaattgctggtgccctgggccacaagaagggtgtgatttggggggactgtgtgcaattaaacaggaaaggaaataacagacttaaagtattaagtcattctgatgcttatcaacaagagtaaagcacagcctaataaataaatatatttgagaatctatattaatccagacagaatgaccaagaggcttgatgtcctggnaataaccacatgaaacctttttattnaaggactaccacttatgaaatatgaaagaattccttanacaaatccaatcttanatctgnattctnaacattttctccctttccattttgaatgctaatattagaagcattntaaagtaatttnggccggcccatggcttaccctggaactcggactttggaggccagtgggaggactgttgaggcnaantttaaaaccncnnggcanattnngaaanctgggcatttttaaaanngatnggaactttttnccccccnantanaacaatnttccnncccttaaacccnaacctttcccngggttttnccctaagggncccttttntttgaaacccaaaaggtncntttgggttncangnatttnaaattnttttngncccnaa

SEQ ID NO: 448 - DNA, 568 bp, Homo sapiens
  misc_feature (439)..(439): n is a, c, g, or t
  misc_feature (448)..(448): n is a, c, g, or t
  misc_feature (480)..(480): n is a, c, g, or t
  misc_feature (488)..(488): n is a, c, g, or t
  misc_feature (496)..(496): n is a, c, g, or t
  misc_feature (504)..(504): n is a, c, g, or t
  misc_feature (506)..(506): n is a, c, g, or t
  misc_feature (509)..(510): n is a, c, g, or t
  misc_feature (520)..(520): n is a, c, g, or t
  misc_feature (523)..(523): n is a, c, g, or t
  misc_feature (527)..(527): n is a, c, g, or t
  misc_feature (532)..(532): n is a, c, g, or t
  misc_feature (540)..(540): n is a, c, g, or t
  misc_feature (562)..(562): n is a, c, g, or t
  misc_feature (566)..(566): n is a, c, g, or t
caggtttctgacctgggctgcagggtgaaagatagtactattagttgaaatagataatacagagagaagagtaaatttgggaagaacatattttgtttatgttgagttcgtgcctgtgagatacaggtggaggtacctagagacaattctgtagaagtctgaagtttaggagagagggcagagttggagataaaattttaggttgtaagcctatcataaatagttaaaatggtgagaatgagggagattgctcagggcagtggttcacaaattttgagtttttgtgtacaaaaataaacttggaataaataccacatgttctcacccatatatggaagctgaaaaaaaaatgagctcatagaagtacagagtagaatctagaatcatggtcattagaggttgggaagggtagtgaggagaggagaataggcagaggtancagatacanagttacagctgttagggaggaaaaagttcagngcttttgnaccatgcncccctgantntgnncaaataattnagngttntttcnaccgctanaaaaaggattttgaatttcccncccnaa

SEQ ID NO: 449 - DNA, 256 bp, Homo sapiens
  misc_feature (7)..(8): n is a, c, g, or t
  misc_feature (13)..(13): n is a, c, g, or t
  misc_feature (19)..(19): n is a, c, g, or t
  misc_feature (21)..(21): n is a, c, g, or t
  misc_feature (41)..(41): n is a, c, g, or t
  misc_feature (45)..(45): n is a, c, g, or t
  misc_feature (47)..(47): n is a, c, g, or t
  misc_feature (49)..(50): n is a, c, g, or t
  misc_feature (52)..(52): n is a, c, g, or t
  misc_feature (57)..(57): n is a, c, g, or t
  misc_feature (77)..(77): n is a, c, g, or t
  misc_feature (82)..(82): n is a, c, g, or t
  misc_feature (96)..(96): n is a, c, g, or t
  misc_feature (103)..(104): n is a, c, g, or t
  misc_feature (108)..(108): n is a, c, g, or t
  misc_feature (111)..(111): n is a, c, g, or t
  misc_feature (126)..(126): n is a, c, g, or t
  misc_feature (144)..(144): n is a, c, g, or t
  misc_feature (161)..(161): n is a, c, g, or t
  misc_feature (170)..(170): n is a, c, g, or t
  misc_feature (185)..(185): n is a, c, g, or t
  misc_feature (191)..(191): n is a, c, g, or t
  misc_feature (199)..(199): n is a, c, g, or t
  misc_feature (205)..(205): n is a, c, g, or t
  misc_feature (239)..(239): n is a, c, g, or t
  misc_feature (254)..(254): n is a, c, g, or t
ggcatannctcgntttgtnancaggctggatggagtgcagngatntnanntnactgnaaccgccacctcccgggttnaagcnattccctgactcancctgtannccantanctgggactacaggcntgccccaccttgcccggntaatttttttttttttnggattttantaaaaacggggtttnaccatnttggccanaatggncttgatctcctgaccttgggattacccccacctnggcctcccaaagggntg

SEQ ID NO: 450 - DNA, 369 bp, Homo sapiens
taaatttttttactctctctacaaggttttttcctagtgtccaaagagctgttcctctttggactaacagttaaatttacaaggggatttagagggttctgtgggcaaatttaaagttgaactaagattctatcttggacaaccagctatcaccaggctcggtaggtttgtcgcctctacctataaatcttcccactattttgctacatagacgggtgtgctcttttagctgttcttaggtagctcgtctggtttcgggggtcttagctttggctctccttgcaaagttatttctagttaattcattatgcagaaggtataggggttagtccttgctatattatgcttggttataatttttcatctttc

SEQ ID NO: 451 - DNA, 810 bp, Homo sapiens
  misc_feature (535)..(535): n is a, c, g, or t
  misc_feature (633)..(633): n is a, c, g, or t
  misc_feature (656)..(656): n is a, c, g, or t
  misc_feature (712)..(712): n is a, c, g, or t
  misc_feature (732)..(732): n is a, c, g, or t
  misc_feature (739)..(739): n is a, c, g, or t
  misc_feature (748)..(748): n is a, c, g, or t
  misc_feature (750)..(750): n is a, c, g, or t
  misc_feature (790)..(790): n is a, c, g, or t
  misc_feature (801)..(801): n is a, c, g, or t
aatctatcaccctatagaagaactaatgttagtataagtaacatgaaaacattctcctccgcataagcctgcgtcagattaaaacactgaactgacaattaacagcccaatatctacaatcaaccaacaagtcattattaccctcactgtcaacccaacacaggcatgctcataaggaaaggttaaaaaaagtaaaaggaactcggcaaatcttaccccgcctgtttaccaaaaacatcacctctagcatcaccagtattagaggcaccgcctgcccagtgacacatgtttaacggccgcggtaccctaaccgtgcaaaggtagcataatcacttgttccttaattagggacctgtatgaatggctccacgagggttcagctgtctcttacttttaaccagtgaaattgacctgcccgcgaagaggcggcataacacagcaagacgagaagaccctatggagctttaatttattaatgcaaacagtacctacaaacccacaggtcctaaactaccaaacctgattaaaaatttcngttggggcgacctcggagcagacccaccttcgagcagtacatgctaagacttcaccagtcaaagcgactactatactcaattgatccaataacttggncaaccggaacaagttacccttanggataacagcgcaatcctattctagagtccttttaaccataggggttaccaacctnaatgttggatcaaggacttnccatggngcaacccgntnttaagggtcgttggttaacgataaaggcctccggaactgngttaaaccggngtaatccaa

SEQ ID NO: 452 - DNA, 288 bp, Homo sapiens
gcattggggtgggggtaaggtgcatctgtttgaaaagtaaacgataaaatgtggattaaagtgcccagcacagagcagatcctcaataaacatttcatttcccacccacactcgccagctcaccccatcatccctttcccttggtgccctccttttttttttatcctagtcattcttccctaatcttccacttgagtgtcaagctgaccttgctgatggtgacattgcacctggatgtactatccaatctgtgatgacattccctgctaataaaagacaacataactc

SEQ ID NO: 453 - DNA, 735 bp, Homo sapiens
  misc_feature (477)..(477): n is a, c, g, or t
  misc_feature (558)..(558): n is a, c, g, or t
  misc_feature (588)..(588): n is a, c, g, or t
  misc_feature (632)..(633): n is a, c, g, or t
  misc_feature (641)..(641): n is a, c, g, or t
  misc_feature (654)..(654): n is a, c, g, or t
  misc_feature (665)..(666): n is a, c, g, or t
  misc_feature (670)..(670): n is a, c, g, or t
  misc_feature (680)..(681): n is a, c, g, or t
  misc_feature (684)..(684): n is a, c, g, or t
  misc_feature (702)..(702): n is a, c, g, or t
  misc_feature (706)..(706): n is a, c, g, or t
  misc_feature (714)..(714): n is a, c, g, or t
  misc_feature (719)..(719): n is a, c, g, or t
  misc_feature (723)..(723): n is a, c, g, or t
  misc_feature (726)..(726): n is a, c, g, or t
ctaattactaccttttattctaatgtgaaccatggccctgaaagctgataacaagcttggctgagcagagggaactaggggtcggcagaaaggattatgggtggaaaacattggctcttccttggggagtgatgctggggaaagggaagagagtggctcagcctgcaggtaaataggctagaaaagccaaggccaaaggctggaggggagaggacagtcagcatgtccagcctggggtctgggtgtagggttatcccttctccctgtgccttcccatctcgtccatgagcctaggccttggagccttgtgttggaggctgctgtgatgtcaggaacggggatctgctagcttttggccacttcctgggacctcacgcccctgttgacagatggagattgggcagcagggccttgctgcattggtatctgctgttccacttggttggcttgccaaggtgacgaaagaccaggcaccanggtctcatgggatgaaggacagggtgggaagatgggggaagggctggggcttaagggagcaagaaagcttgtacctgtgtngggccggcaggatgttaaaaaccgctttgntgttttaaaatggggactgggcccaaatcctgttgggcacccanncccaaaanacgggtcctccanttccaaggganntttngggggaaccnnaangggcttttttccaggaangccngttttttnaaacngganccntgggcattc

SEQ ID NO: 454 - DNA, 1002 bp, Homo sapiens
  misc_feature (510)..(510): n is a, c, g, or t
  misc_feature (616)..(616): n is a, c, g, or t
  misc_feature (620)..(620): n is a, c, g, or t
  misc_feature (634)..(634): n is a, c, g, or t
  misc_feature (646)..(646): n is a, c, g, or t
  misc_feature (657)..(657): n is a, c, g, or t
  misc_feature (665)..(665): n is a, c, g, or t
  misc_feature (668)..(668): n is a, c, g, or t
  misc_feature (755)..(755): n is a, c, g, or t
  misc_feature (757)..(757): n is a, c, g, or t
  misc_feature (784)..(785): n is a, c, g, or t
  misc_feature (804)..(804): n is a, c, g, or t
  misc_feature (809)..(809): n is a, c, g, or t
  misc_feature (814)..(814): n is a, c, g, or t
  misc_feature (816)..(816): n is a, c, g, or t
  misc_feature (818)..(819): n is a, c, g, or t
  misc_feature (824)..(824): n is a, c, g, or t
  misc_feature (831)..(831): n is a, c, g, or t
  misc_feature (837)..(837): n is a, c, g, or t
  misc_feature (839)..(839): n is a, c, g, or t
  misc_feature (844)..(844): n is a, c, g, or t
  misc_feature (859)..(859): n is a, c, g, or t
  misc_feature (881)..(881): n is a, c, g, or t
  misc_feature (887)..(888): n is a, c, g, or t
  misc_feature (890)..(890): n is a, c, g, or t
  misc_feature (894)..(896): n is a, c, g, or t
  misc_feature (900)..(900): n is a, c, g, or t
  misc_feature (913)..(913): n is a, c, g, or t
  misc_feature (923)..(923): n is a, c, g, or t
  misc_feature (926)..(926): n is a, c, g, or t
  misc_feature (932)..(932): n is a, c, g, or t
  misc_feature (935)..(935): n is a, c, g, or t
  misc_feature (945)..(945): n is a, c, g, or t
  misc_feature (957)..(958): n is a, c, g, or t
  misc_feature (960)..(960): n is a, c, g, or t
  misc_feature (976)..(976): n is a, c, g, or t
  misc_feature (982)..(983): n is a, c, g, or t
  misc_feature (988)..(988): n is a, c, g, or t
  misc_feature (994)..(994): n is a, c, g, or t
cgggattccggtggcaacgttgctggtgacagcaaaaatgacccaccaatggaagcagctggcttcactgctcaggtgattatcctgaaccatccaggccaaataagcgccggctatgcccctgtattggattgccacacggctcacattgcatgcaagtttgctgagctgaaggaaaagattgatcgccgttctggtaaaaagctggaagatggccctaaattcttgaagtctggtgatgctgccattgttgatatggttcctggcaagcccatgtgtgttgagagcttctcagactatccacctttgggtcgctttgctgttcgtgatatgagacagacagttgcggtgggtgtcatcaaagcagtggacaagaaggctgctggagctggcaaggtcaccaagtctgcccagaaagctcagaaggctaaatgaatattatccctaatacctggcacccactcttaatcagtggtggaagaacgtctcagaactgttggttcaattggncattaagtttaatagtaaaagactgggtaatgatacaatgcatcgtaaaaccttcagaaggaaaggagaatgtttgtggaccactttgggtttcctttttgcgtgngcanttttaagtattagnttttaaaacagncttttaatggnacacttgnccnaaaatttgcccaaattttggaaccctttaaaaagttaatgggaaaaaaaaacggattccgggggtaccttccaaaacttttaaaaancnggcccgcattttttctgaggggtaacnngttccccataattcccccnggganaagcntntnnctttngggaccnttttgnanccccnttttaaggccccccnttttaacaaccccccccttgcntggacnnanaaannncggntttttatttttangaacaaaccnttnggttcnaancccttggtcnccccggggggtnncnaaaatttttttccccntttttnnggggnaaattngggaaatt

SEQ ID NO: 455 - DNA, 447 bp, Homo sapiens
ctccacgagggttcagctgtctcttacttttaaccagtgaaattgacctgcccgtgaagaggcgggcatgacacagcaagacgagaagaccctatggagctttaatttattaatgcaaacagtacctaacaaacccacaggtcctaaactaccaaacctgcattaaaaatttcggttggggcgacctcggagcagaacccaacctccgagcagtacatgctaagacttcaccagtcaaagcgaactactatactcaattgatccaataacttgaccaacggaacaagttaccctagggataacagcgcaatcctattctagagtccatatcaacaatagggtttacgacctcgatgttggatcaggacatcccaatggtgcagccgctattaaaggttcgtttgttcaacgattaaagtcctacgtgatctgagttcagaccggagt

SEQ ID NO: 456 - DNA, 925 bp, Homo sapiens
  misc_feature (511)..(511): n is a, c, g, or t
  misc_feature (521)..(521): n is a, c, g, or t
  misc_feature (523)..(523): n is a, c, g, or t
  misc_feature (545)..(545): n is a, c, g, or t
  misc_feature (563)..(563): n is a, c, g, or t
  misc_feature (585)..(585): n is a, c, g, or t
  misc_feature (591)..(591): n is a, c, g, or t
  misc_feature (593)..(593): n is a, c, g, or t
  misc_feature (609)..(609): n is a, c, g, or t
  misc_feature (636)..(636): n is a, c, g, or t
  misc_feature (642)..(642): n is a, c, g, or t
  misc_feature (656)..(656): n is a, c, g, or t
  misc_feature (664)..(664): n is a, c, g, or t
  misc_feature (673)..(673): n is a, c, g, or t
  misc_feature (702)..(702): n is a, c, g, or t
  misc_feature (721)..(721): n is a, c, g, or t
  misc_feature (732)..(732): n is a, c, g, or t
  misc_feature (738)..(738): n is a, c, g, or t
  misc_feature (743)..(743): n is a, c, g, or t
  misc_feature (746)..(746): n is a, c, g, or t
  misc_feature (764)..(765): n is a, c, g, or t
  misc_feature (775)..(776): n is a, c, g, or t
  misc_feature (781)..(781): n is a, c, g, or t
  misc_feature (803)..(803): n is a, c, g, or t
  misc_feature (825)..(825): n is a, c, g, or t
  misc_feature (833)..(833): n is a, c, g, or t
  misc_feature (845)..(845): n is a, c, g, or t
  misc_feature (856)..(856): n is a, c, g, or t
  misc_feature (858)..(858): n is a, c, g, or t
  misc_feature (861)..(861): n is a, c, g, or t
  misc_feature (868)..(868): n is a, c, g, or t
  misc_feature (873)..(874): n is a, c, g, or t
  misc_feature (881)..(881): n is a, c, g, or t
  misc_feature (883)..(883): n is a, c, g, or t
  misc_feature (893)..(893): n is a, c, g, or t
  misc_feature (898)..(898): n is a, c, g, or t
  misc_feature (902)..(903): n is a, c, g, or t
gctttaatatacgctattggagctggaattaccgcggctgctggcaccagacttgccctccaatggatcctcgttaaaggatttaaagtggactcattccaattacagggcctcgaaagagtcctgtattgttatttttcgtcactacctccccgggtcgggagtgggtaatttgcgcgcctgctgccttccttggatgtggtagccgtttctcaggctccctctccggaatcgaaccctgattccccgtcacccgtggtcaccatggtaggcacggcgactaccatcgaaagttgatagggcagacgttcgaatgggtcgtcgccgcacggggggcgtgcgatcggcccgaggttatctagagtcaccaaagccgccggcgcccgcccccggccggggccggagaggggctgaccgggttggttttgatctgataaatgcacgcatcccccccgcgaagggggtcaagcgcccgtcggcatgtattaactctagaattaccacagttatncaagtagganangagcgagcgaccaaaggaaccntactggattaatgagccntttccagtttcactgtaccggncgtgcnanttaaacatgcattggnttaatctttgagacaagcatatgctantggcanggtttttttatggnaaagatgntttattggnggcagtactacaaggcattaatattggtncccaaaaaaaaactcggtnttattaaatantgggcnttaanacntaatgaacttgaccaacnnttgctggatnnctgantcctcctggtttttgggaaagnaacccaccactatttttggcantcttttcnccacttgaaaanaagggggtttntnggnggcttanttccnnctttaancnggaattttanccctngaannttgttttccgaactttttaaaa

SEQ ID NO: 457 - DNA, 516 bp, Homo sapiens
  misc_feature (327)..(327): n is a, c, g, or t
tcaagaggagcaagaagttaaagtggaaagcagggcaatggtcttggcagcatttgttcagagatcaactgtattatcaaaaaacagaagtaaatttattcaagatccagaaaaatatgatccattattcatgcaccctgatctgtcttgtggaacacacactagtagctgtgggcacattatgcatgcccattgttggcaaaggtattttgattccgttcaagctaaagaacagcgaaggcaacagagattacgcttacatacgagctatgatgtagaaaacggagaattcctttgccccctttgtgaatgcttgagtaatactgntattcctctgctgcttctccaagaaatatttttaacaacaggttaaatttttcagaccaaccaaatctgactcagtggattagaacaatatctcagcaaataaaagcggaattccagctgagcgccggcgctaccattaccagttggtctggggcaaaaataataattaccgggcaggccatgtcaagg

SEQ ID NO: 458 - DNA, 965 bp, Homo sapiens
  misc_feature (528)..(528): n is a, c, g, or t
  misc_feature (560)..(560): n is a, c, g, or t
  misc_feature (586)..(586): n is a, c, g, or t
  misc_feature (600)..(600): n is a, c, g, or t
  misc_feature (653)..(653): n is a, c, g, or t
  misc_feature (675)..(675): n is a, c, g, or t
  misc_feature (680)..(681): n is a, c, g, or t
  misc_feature (684)..(684): n is a, c, g, or t
  misc_feature (699)..(699): n is a, c, g, or t
  misc_feature (703)..(703): n is a, c, g, or t
  misc_feature (722)..(722): n is a, c, g, or t
  misc_feature (734)..(734): n is a, c, g, or t
  misc_feature (741)..(741): n is a, c, g, or t
  misc_feature (747)..(747): n is a, c, g, or t
  misc_feature (752)..(752): n is a, c, g, or t
  misc_feature (755)..(755): n is a, c, g, or t
  misc_feature (764)..(764): n is a, c, g, or t
  misc_feature (782)..(782): n is a, c, g, or t
  misc_feature (789)..(789): n is a, c, g, or t
  misc_feature (794)..(794): n is a, c, g, or t
  misc_feature (826)..(827): n is a, c, g, or t
  misc_feature (832)..(832): n is a, c, g, or t
  misc_feature (840)..(841): n is a, c, g, or t
  misc_feature (845)..(846): n is a, c, g, or t
  misc_feature (854)..(854): n is a, c, g, or t
  misc_feature (860)..(861): n is a, c, g, or t
  misc_feature (865)..(865): n is a, c, g, or t
  misc_feature (868)..(868): n is a, c, g, or t
  misc_feature (871)..(871): n is a, c, g, or t
  misc_feature (874)..(874): n is a, c, g, or t
  misc_feature (883)..(883): n is a, c, g, or t
  misc_feature (890)..(892): n is a, c, g, or t
  misc_feature (898)..(898): n is a, c, g, or t
  misc_feature (904)..(904): n is a, c, g, or t
  misc_feature (910)..(910): n is a, c, g, or t
  misc_feature (915)..(915): n is a, c, g, or t
  misc_feature (925)..(926): n is a, c, g, or t
  misc_feature (932)..(933): n is a, c, g, or t
  misc_feature (935)..(936): n is a, c, g, or t
  misc_feature (939)..(939): n is a, c, g, or t
  misc_feature (946)..(946): n is a, c, g, or t
  misc_feature (964)..(964): n is a, c, g, or t
gaaatgcattcttatgttataccaaaacacatattcatagtagttctatttatagttgccccaaactaggtcaatcaaatcttcaaaaaaagtaaaatagttaattcatggtcacaaaacatacatatttcataatttcatttgtataaacctcaaaagcaaaaccaatctatggtatttcaagtcaagattgtggttacctttaagggagaaaatagcaactgggaaaaggtatgaggggggattctagggtgctggtaacgatctgtttcttgatttgggtgctggctatatatgttcactattcattttttaaaaatagacacagggtctcactatgttgcccaggctggcttaaactcttggctcaagcagtcctcccacctcggcctcccaaagtgccgagattacaggtgtgagccactgccccggccgagatttacttttataatgactctaatatttagcattcaaaattgtgaaaggggagaaagattctgagaaatacagaatctaaaatgggattgnctaagtaatctttcatattcataagttgtagncttaaataaaaaggttcatgtggtantaccaggacatcancctctggtcattctggctggataatatagatctcaaatatattaattattagncgggctttactctggtgataanactcnnaangctaatactttaagntggnattcctttctggtaatggnacagtccccaantaaaccnttttgngccanggnccacattcntacagggaagggaaaaanccttttnttagntcaatcctaatcacttttccccaaatggggannctgcntccaaggnntaanntttttttngccttnntttnatnggnggnttaaaaaanccccggnnnggtttngccttngcccgnaaaantttttttttnnaaaaanncnngtntaaaccntttttttttaaaaggganc

SEQ ID NO: 459 - DNA, 563 bp, Homo sapiens
gtgttgtgaatattcaaaatcctctcttctagctgtttgaaaatatacactaaattattgtgagcaatattcaggctaccatgctacagagcactgaactttttcctccctaacagctgtaactttgtatctgttacctctgcctattctcctctcctcactacccttcccaacctctaatgaccatgattctagattctactctgtacttctatgagctcatttttttttcagcttccatatatgggtgagaacatgtggtatttattccaagtttatttttgtacacaaaaactcaaaatttgtgaaccactgcctgagcaatctccctcattctcaccattttaactatttatgataggcttacaacctaaaattttatctccaactctgcctctctcctaaacttcagacttctacagaattgctctaggtaccttcacctgtatctacaggcacgaactcacataaacaaaatatgttcttcccaaatttactcttctctctggataactatttcaactaatagtctatctttcaccctggagccagtcagaaacctg

SEQ ID NO: 460 - DNA, 411 bp, Homo sapiens
  misc_feature (84)..(84): n is a, c, g, or t
  misc_feature (269)..(269): n is a, c, g, or t
  misc_feature (271)..(271): n is a, c, g, or t
  misc_feature (277)..(277): n is a, c, g, or t
  misc_feature (280)..(280): n is a, c, g, or t
  misc_feature (282)..(282): n is a, c, g, or t
  misc_feature (287)..(287): n is a, c, g, or t
  misc_feature (293)..(294): n is a, c, g, or t
  misc_feature (301)..(301): n is a, c, g, or t
  misc_feature (308)..(308): n is a, c, g, or t
  misc_feature (322)..(322): n is a, c, g, or t
  misc_feature (329)..(329): n is a, c, g, or t
  misc_feature (332)..(332): n is a, c, g, or t
  misc_feature (364)..(364): n is a, c, g, or t
  misc_feature (370)..(370): n is a, c, g, or t
  misc_feature (384)..(384): n is a, c, g, or t
  misc_feature (398)..(398): n is a, c, g, or t
cagcactttgggaggccgaggtgggggtaatcacaaggtcaggagatcaagaccatcctggccaacatggtgaaaccccgtctntactaaaatccaaaaaaaaaaaaaattagccgggcaaggtggcgcatgcctgtagtcccagctactggactacaggctgagtcagggaatcgcttgaacccgggaggtggcggttgcagtgagctgagatcactgcactccatccagcctgctgacagagcgagactatgcctcaaaaaaaaaananaaaaanaananaaaanaaaacnnaaaaaanaaaaaanaaaaaccagttgancgccggncgntaccattccagggggtctggggtcaaaaatantaatanccgggcaggccatntcaagggcgaattntgcagatatccat

SEQ ID NO: 461 - DNA, 369 bp, Homo sapiens
gaaagatgaaaaattataaccaagcataatatagcaaggactaacccctataccttctgcataatgaattaactagaaataactttgcaaggagagccaaagctaagacccccgaaaccagacgagctacctaagaacagctaaaagagcacacccgtctatgtagcaaaatagtgggaagatttataggtagaggcgacaaacctaccgagcctggtgatagctggttgtccaagatagaatcttagttcaactttaaatttgcccacagaaccctctaaatccccttgtaaatttaactgttagtccaaagaggaacagctctttggacactaggaaaaaaccttgtagagagagtaaaaaaattta

SEQ ID NO: 462 - DNA, 288 bp, Homo sapiens
gagttatgttgtcttttattagcagggaatgtcatcacagattggatagtacatccaggtgcaatgtcaccatcagcaaggtcagcttgacactcaagtggaagattagggaagaatgactaggataaaaaaaaaaggagggcaccaagggaaagggatgatggggtgagctggcgagtgtgggtgggaaatgaaatgtttattgaggatctgctctgtgctgggcactttaatccacattttatcgtttacttttcaaacagatgcaccttacccccaccccaatgc

SEQ ID NO: 463 - DNA, 1028 bp, Homo sapiens
  misc_feature (541)..(541): n is a, c, g, or t
  misc_feature (579)..(579): n is a, c, g, or t
  misc_feature (615)..(615): n is a, c, g, or t
  misc_feature (649)..(649): n is a, c, g, or t
  misc_feature (681)..(681): n is a, c, g, or t
  misc_feature (697)..(697): n is a, c, g, or t
  misc_feature (725)..(725): n is a, c, g, or t
  misc_feature (735)..(735): n is a, c, g, or t
  misc_feature (739)..(739): n is a, c, g, or t
  misc_feature (758)..(758): n is a, c, g, or t
  misc_feature (773)..(773): n is a, c, g, or t
  misc_feature (780)..(780): n is a, c, g, or t
  misc_feature (800)..(800): n is a, c, g, or t
  misc_feature (803)..(804): n is a, c, g, or t
  misc_feature (808)..(808): n is a, c, g, or t
  misc_feature (812)..(812): n is a, c, g, or t
  misc_feature (814)..(814): n is a, c, g, or t
  misc_feature (816)..(816): n is a, c, g, or t
  misc_feature (823)..(823): n is a, c, g, or t
  misc_feature (843)..(843): n is a, c, g, or t
  misc_feature (855)..(856): n is a, c, g, or t
  misc_feature (864)..(864): n is a, c, g, or t
  misc_feature (884)..(884): n is a, c, g, or t
  misc_feature (886)..(886): n is a, c, g, or t
  misc_feature (899)..(899): n is a, c, g, or t
  misc_feature (903)..(903): n is a, c, g, or t
  misc_feature (913)..(913): n is a, c, g, or t
  misc_feature (923)..(924): n is a, c, g, or t
  misc_feature (934)..(934): n is a, c, g, or t
  misc_feature (941)..(941): n is a, c, g, or t
  misc_feature (948)..(948): n is a, c, g, or t
  misc_feature (950)..(950): n is a, c, g, or t
  misc_feature (955)..(955): n is a, c, g, or t
  misc_feature (958)..(958): n is a, c, g, or t
  misc_feature (962)..(962): n is a, c, g, or t
  misc_feature (972)..(972): n is a, c, g, or t
  misc_feature (977)..(977): n is a, c, g, or t
  misc_feature (979)..(979): n is a, c, g, or t
  misc_feature (994)..(994): n is a, c, g, or t
  misc_feature (998)..(998): n is a, c, g, or t
  misc_feature (1000)..(1001): n is a, c, g, or t
  misc_feature (1005)..(1006): n is a, c, g, or t
  misc_feature (1009)..(1009): n is a, c, g, or t
  misc_feature (1011)..(1011): n is a, c, g, or t
  misc_feature (1013)..(1013): n is a, c, g, or t
  misc_feature (1018)..(1018): n is a, c, g, or t
  misc_feature (1022)..(1022): n is a, c, g, or t
cacaggaggagaagcaggagctgtcgggaagatcagaagccagtcatggatgaccagcgcgaccttatctccaacaatgagcaactgcccatgctgggccggcgccctggggccccggagagcaagtgcagccgcggagccctgtacacaggcttttccatcctggtgactctgctcctcgctggccaggccaccaccgcctacttcctgtaccagcagcagggccggctggacaaactgacagtcacctcccagaacctgcagctggagaacctgcgcatgaagcttcccaagcctcccaagcctgtgagcaagatgcgcatggccaccccgctgctgatgcaggcgctgccatgggagccctgcccaggggcccatgcagaatgccaccaagtatggcaacatgacagaggaccatgtgatgcacctgctccagaatgctgaccccctgaaggtgtacccgccactgaaggggagcttcccggagaacctgagacaccttaagaacaccatggagaccatagactggaaggtctttganagctggatgcaccatttggcttctgttgaaatgagcangcacttctttggacaaaagcccacttgacgcttcancgaagagtcacttggaactggaggaccgtctttnggctggtgtgaccaacaggatctgggccaatncccattgaaacaacanaagcggctttaaaatcttgcgggcccanaaagttcaantttnttggttccttaggcccaanccttcccaattttcnacttggncctaatccatgaaaactggngcnnggtntttntnanccttggnaagaaaaacaattggaacancgataacatgcnnaaggcctngtggccaaattctttttaanangggctagggcccnaaanggcaaaattnaaaaaccctnntgaataaaanatttaanaaaggtnanggttngtnttgncaaatggaangcccngnaagggaacctccccnaccnanngganntgnangnttccncaantggctt

SEQ ID NO: 464 - DNA, 930 bp, Homo sapiens
  misc_feature (641)..(641): n is a, c, g, or t
  misc_feature (648)..(648): n is a, c, g, or t
  misc_feature (676)..(676): n is a, c, g, or t
  misc_feature (704)..(704): n is a, c, g, or t
  misc_feature (710)..(710): n is a, c, g, or t
  misc_feature (715)..(715): n is a, c, g, or t
  misc_feature (750)..(750): n is a, c, g, or t
  misc_feature (761)..(761): n is a, c, g, or t
  misc_feature (764)..(764): n is a, c, g, or t
  misc_feature (769)..(769): n is a, c, g, or t
  misc_feature (795)..(795): n is a, c, g, or t
  misc_feature (823)..(823): n is a, c, g, or t
  misc_feature (826)..(826): n is a, c, g, or t
  misc_feature (834)..(834): n is a, c, g, or t
  misc_feature (841)..(841): n is a, c, g, or t
  misc_feature (846)..(846): n is a, c, g, or t
  misc_feature (850)..(850): n is a, c, g, or t
  misc_feature (855)..(856): n is a, c, g, or t
  misc_feature (874)..(875): n is a, c, g, or t
  misc_feature (878)..(878): n is a, c, g, or t
  misc_feature (889)..(890): n is a, c, g, or t
  misc_feature (894)..(894): n is a, c, g, or t
  misc_feature (905)..(905): n is a, c, g, or t
  misc_feature (911)..(911): n is a, c, g, or t
  misc_feature (921)..(921): n is a, c, g, or t
  misc_feature (923)..(923): n is a, c, g, or t
cggagttccgggtatctgggctccaggcagaagcacagcctccccgacctgccctacgactacggcgccctggaacctcacatcaacgcgcagatcatgcagctgcaccacagcaagcaccacgcggcctacgtgaacaacctgaacgtcaccgaggagaagtaccaggaggcgttggccaagggagatgttacagcccagatagctcttcagcctgcactgaagttcaatggtggtggtcatatcaatcatagcattttctggacaaacctcagccctaacggtggtggagaacccaaaggggagttgctggaagccatcaaacgtgactttggttcctttgacaagtttaaggagaagctgacggctgcatctgttggtgtccaaggctcaggttggggttggcttggtttcaataaggaacggggacacttacaaattgctgcttgtccaaatcaggatccactgcaaggaacaacaggccttattccactgctggggattgatgtgtgggagcacgcttactaccttcagtataaaaatgtcaggcctgattatctaaaagctatttggaatgtaatcaaccggaattccgtttttttttttctcatttaacttttttaatgggctcaaaattctgngacaaanttttggcaagtgtttccattaaaaagtntgatttaaaactaatacttaaaattgcncacccnaaaanggaaaaccaagtggtcccaaacattctctttcttntaaggttacangcntggtntattaaccacttttctctaacttaangccattgaacaacattttaaacgtttcnccngttaaaanggggggnggttngggnaaatnnttacctttgacttttggnnaanttgggacttcnnttcnaactttttccnggtttnaccccccaangnggttttc

SEQ ID NO: 465 - DNA, 444 bp, Homo sapiens
actccggtctgaactcagatcacgtaggactttaatcgttgaacaaacgaacctttaatagcggctgcaccattgggatgtcctgatccaacatcgaggtcgtaaaccctattgttgatatggactctagaataggattgcgctgttatccctagggtaacttgttccgttggtcaagttattggatcaattgagtatagtagttcgctttgactggtgaagtcttagcatgtactgctcggaggttgggttctgctccgaggtcgccccaaccgaaatttttaatgcaggtttggtagtttaggacctgtgggtttgttaggtactgtttgcattaataaattaaagctccatagggtcttctcgtcttgctgtgtcatgcccgctcttcacggcaggtcaatttcactggttaaaagtaagagacagctgaaccctcgtgga

SEQ ID NO: 466 - DNA, 767 bp, Homo sapiens
  misc_feature (478)..(478): n is a, c, g, or t
  misc_feature (553)..(553): n is a, c, g, or t
  misc_feature (574)..(574): n is a, c, g, or t
  misc_feature (598)..(598): n is a, c, g, or t
  misc_feature (641)..(641): n is a, c, g, or t
  misc_feature (665)..(665): n is a, c, g, or t
  misc_feature (681)..(681): n is a, c, g, or t
  misc_feature (711)..(711): n is a, c, g, or t
  misc_feature (716)..(716): n is a, c, g, or t
  misc_feature (718)..(718): n is a, c, g, or t
  misc_feature (725)..(725): n is a, c, g, or t
  misc_feature (734)..(734): n is a, c, g, or t
  misc_feature (741)..(741): n is a, c, g, or t
  misc_feature (749)..(749): n is a, c, g, or t
  misc_feature (759)..(760): n is a, c, g, or t
cattttcgttggtggtgttcagttgtggcggttgctggtcagtaacagccaagatgctgcggaatctgctggctcttcgtcagattgggcagaggacgataagcactgcttcccgcaggcattttaaaaataaagttccggagaagcaaaaactgttccaggaggatgatgaaattccactgtatctaaagggtggggtagctgatgccctcctgtatagagccaccatgattcttacagttggtggaacagcatatgccatatatgagctggctgtggcttcatttcccaagaagcaggagtgacttcagtcatcccagcaatcgcttggttcagtttcattcagctctctatggaccagtaatctgataaataaccgagctcttctttggggatcaatatttattgacttgtagtaactgccaccaataaagcagtctttaccataaaaaaaaacctgccagtagcatatgcttgnctcaaagattaagccatgcatgtctaagtacgcacggccggtacagtgaaactgcgaatggctcattaaatcagntattgggtcctttggtcgctngctcctctcctacttggatactgnggtaattctaaactaatacatgccgacgggcgcttaccccttngcgggggggatcctgcatttatanatcaaaccaacccggnaagccttttcggcccggccgggggcggccnccggngnttttggngactttaanaaccttnggcccaangacccccccnngggggga

SEQ ID NO: 467 - DNA, 591 bp, Homo sapiens
  misc_feature (480)..(480): n is a, c, g, or t
  misc_feature (513)..(513): n is a, c, g, or t
  misc_feature (522)..(522): n is a, c, g, or t
  misc_feature (580)..(580): n is a, c, g, or t
atgtaagtaagtgtattatggccagttaaggtaggcactataaaaataggccgaaaagtttagaatattccttttttactgtagtctgttttttaaaatttgaaacttgttagagagtttggaaaacagtcttcttcctcccactccacttcctgccaaaaaagaggggaagcacaatggtcttcaaaaaaggtgataaagtaaatgcatattataaaatattttaaacttttgtgtgtgtggtttcacgtacaggaaatgaacatgcaaattcttagaaactgttgtcactgtgtttctgaaatgctaaaaaaaattatgctttgagctacctgctgcttataattcctttccctgaataggtaggtttttatagttaacaaattttaaatgtaagttgattttgatagtagtatttcattatgcaatctggagaggagagaagtgtttttcataaagtggatattaattacaactttnaaaagccaatcagtaaacattcattgatcttgnaataactgngaccctaattaaaagggtgctaggcttgtatgcttggaaatatttgaaatttttattnttaaaactggg

SEQ ID NO: 468 - DNA, 604 bp, Homo sapiens
  misc_feature (114)..(114): n is a, c, g, or t
  misc_feature (422)..(422): n is a, c, g, or t
  misc_feature (427)..(427): n is a, c, g, or t
  misc_feature (467)..(467): n is a, c, g, or t
  misc_feature (515)..(515): n is a, c, g, or t
  misc_feature (523)..(523): n is a, c, g, or t
  misc_feature (543)..(543): n is a, c, g, or t
  misc_feature (586)..(586): n is a, c, g, or t
  misc_feature (594)..(594): n is a, c, g, or t
  misc_feature (599)..(599): n is a, c, g, or t
cagattttaaagaataaaaaaatttcaaatattttccagacataacagcctagcaaccattttaattaggtgtcacagttaattacaagatcaatgaatgtttactgattggcnttttaaagttgtaattaatatccactttatgaaaaacactctctcctctccagattgcataatgaaatactactatcaaaatcaactacatttaaaatttgttaactataaaaacctacctattcagggaaaggaattataagcagcaggtagctcaaagcataattttttttagcatttcagaaacacagtgacaacagtttctaagaatttgcatgttcatttcctgtacgtgaaaccacacacacaaaagtttaaaatattttataatatgcatttactttatcaccttttttgaagaccattgngcttnccctcttttttggccaggaagtgggagtgggaggaagaanactgttttccaactcttaacaggttcaaattttaaaaaacagactacngtaaaaanggatattctaaactttcggnctattttataggcctacctaactggcctaatccttactacatnggattccnctgancgccg

SEQ ID NO: 469 - DNA, 860 bp, Homo sapiens
  misc_feature (432)..(432): n is a, c, g, or t
  misc_feature (443)..(443): n is a, c, g, or t
  misc_feature (468)..(468): n is a, c, g, or t
  misc_feature (470)..(470): n is a, c, g, or t
  misc_feature (478)..(478): n is a, c, g, or t
  misc_feature (514)..(515): n is a, c, g, or t
  misc_feature (524)..(524): n is a, c, g, or t
  misc_feature (541)..(541): n is a, c, g, or t
  misc_feature (553)..(553): n is a, c, g, or t
  misc_feature (556)..(556): n is a, c, g, or t
  misc_feature (558)..(558): n is a, c, g, or t
  misc_feature (563)..(563): n is a, c, g, or t
  misc_feature (567)..(567): n is a, c, g, or t
  misc_feature (631)..(631): n is a, c, g, or t
  misc_feature (648)..(648): n is a, c, g, or t
  misc_feature (656)..(656): n is a, c, g, or t
  misc_feature (660)..(660): n is a, c, g, or t
  misc_feature (673)..(673): n is a, c, g, or t
  misc_feature (696)..(696): n is a, c, g, or t
  misc_feature (703)..(703): n is a, c, g, or t
  misc_feature (709)..(709): n is a, c, g, or t
  misc_feature (721)..(721): n is a, c, g, or t
  misc_feature (727)..(727): n is a, c, g, or t
  misc_feature (730)..(730): n is a, c, g, or t
  misc_feature (743)..(743): n is a, c, g, or t
  misc_feature (745)..(745): n is a, c, g, or t
  misc_feature (750)..(750): n is a, c, g, or t
  misc_feature (759)..(759): n is a, c, g, or t
  misc_feature (763)..(763): n is a, c, g, or t
  misc_feature (773)..(773): n is a, c, g, or t
  misc_feature (782)..(782): n is a, c, g, or t
  misc_feature (792)..(792): n is a, c, g, or t
  misc_feature (799)..(799): n is a, c, g, or t
  misc_feature (805)..(806): n is a, c, g, or t
  misc_feature (811)..(812): n is a, c, g, or t
  misc_feature (816)..(817): n is a, c, g, or t
  misc_feature (819)..(819): n is a, c, g, or t
  misc_feature (822)..(822): n is a, c, g, or t
  misc_feature (824)..(824): n is a, c, g, or t
  misc_feature (827)..(828): n is a, c, g, or t
  misc_feature (833)..(835): n is a, c, g, or t
  misc_feature (844)..(845): n is a, c, g, or t
agaatctggtgacttcagttgagcccccagcagaggtgactccatcagagagcagtgagagcatctccctcgtgacacagatcgccaacccggccactgcacctgaggcacgagtgctacccaaggacctgtcccaaaagctgctagaggcatccttggaggaacagggcctggctgtggatgtgggtgagactggaccctcaccccctattcactccaagcccctaacgcctgctggccacaccggcggcccagagcccaggcctccagccagagtagagactctgagggaggaggcgcccacagacttacgggtgtttgagctgaactcggatagtgggaagtctacacccttcaacaatggaaagaaaggctcaagcacggacattaatgaggactgggaaaaagactttgacttggacatgactgaanaggaagtgcanatggcactttccaagtggatgcctncngggagctngaaaattaaaatgggaagactgggaatgagggaccnnaaggagcanttcccccccatgggatnttttgcttcctnctngnttaanccancctggatgaatgaaaatgttccccaaattctttgcaaccaaactttggcacaaatttgggggtncttgttggccttttggnctttgttnaccnggaagggttttantccggccaaaattttatttgccncattggngacccnggggaggaactntctctnccnaaaacggtttttntnaaccntgttcttangatnttttgaaccnaggaatttncctttctgtnaaaaaanaacccnnttttnngaanngnaantnttnnttttnnnggggggggnnccctccttgtaaaag

SEQ ID NO: 470 - DNA, 899 bp, Homo sapiens
  misc_feature (328)..(328): n is a, c, g, or t
  misc_feature (345)..(345): n is a, c, g, or t
  misc_feature (358)..(358): n is a, c, g, or t
  misc_feature (442)..(442): n is a, c, g, or t
  misc_feature (466)..(466): n is a, c, g, or t
  misc_feature (477)..(477): n is a, c, g, or t
  misc_feature (483)..(483): n is a, c, g, or t
  misc_feature (524)..(524): n is a, c, g, or t
  misc_feature (540)..(540): n is a, c, g, or t
  misc_feature (544)..(544): n is a, c, g, or t
  misc_feature (562)..(562): n is a, c, g, or t
  misc_feature (570)..(570): n is a, c, g, or t
  misc_feature (574)..(574): n is a, c, g, or t
  misc_feature (598)..(598): n is a, c, g, or t
  misc_feature (610)..(610): n is a, c, g, or t
  misc_feature (623)..(625): n is a, c, g, or t
  misc_feature (642)..(642): n is a, c, g, or t
  misc_feature (655)..(655): n is a, c, g, or t
  misc_feature (666)..(666): n is a, c, g, or t
  misc_feature (670)..(670): n is a, c, g, or t
  misc_feature (673)..(673): n is a, c, g, or t
  misc_feature (678)..(678): n is a, c, g, or t
  misc_feature (687)..(687): n is a, c, g, or t
  misc_feature (695)..(695): n is a, c, g, or t
  misc_feature (699)..(700): n is a, c, g, or t
  misc_feature (704)..(705): n is a, c, g, or t
  misc_feature (714)..(714): n is a, c, g, or t
  misc_feature (721)..(721): n is a, c, g, or t
  misc_feature (723)..(723): n is a, c, g, or t
  misc_feature (742)..(742): n is a, c, g, or t
  misc_feature (745)..(745): n is a, c, g, or t
  misc_feature (750)..(750): n is a, c, g, or t
  misc_feature (756)..(757): n is a, c, g, or t
  misc_feature (768)..(769): n is a, c, g, or t
  misc_feature (773)..(773): n is a, c, g, or t
  misc_feature (784)..(784): n is a, c, g, or t
  misc_feature (786)..(786): n is a, c, g, or t
  misc_feature (789)..(790): n is a, c, g, or t
  misc_feature (796)..(796): n is a, c, g, or t
  misc_feature (798)..(798): n is a, c, g, or t
  misc_feature (805)..(805): n is a, c, g, or t
  misc_feature (813)..(813): n is a, c, g, or t
  misc_feature (821)..(823): n is a, c, g, or t
  misc_feature (828)..(828): n is a, c, g, or t
  misc_feature (833)..(833): n is a, c, g, or t
  misc_feature (836)..(836): n is a, c, g, or t
  misc_feature (839)..(839): n is a, c, g, or t
  misc_feature (841)..(841): n is a, c, g, or t
  misc_feature (843)..(843): n is a, c, g, or t
  misc_feature (845)..(845): n is a, c, g, or t
  misc_feature (850)..(850): n is a, c, g, or t
  misc_feature (858)..(858): n is a, c, g, or t
  misc_feature (862)..(862): n is a, c, g, or t
  misc_feature (866)..(867): n is a, c, g, or t
  misc_feature (872)..(872): n is a, c, g, or t
  misc_feature (878)..(878): n is a, c, g, or t
  misc_feature (880)..(880): n is a, c, g, or t
  misc_feature (884)..(885): n is a, c, g, or t
  misc_feature (888)..(888): n is a, c, g, or t
  misc_feature (894)..(895): n is a, c, g, or t
aaaggaaggaggtgggtcagggtttggtctctggattctgaaccccaaaggagcctttccaggaatggaaaatgcctgggagggggagagtcccaagagaggcaaatttcccagagataagtgcctcttacccactgggataggaaccaaaatgtgttcactgtccctgtttagccaagggtaggtggcatggccctccctgcctgcttatgtatggacagagtatgttgtctcagcttcctccgagagagactggtggtttagcttctgtctacacaggcagaagggctagaactatcccttgggactttccagcaggagtcctcangaacagtgggtgttcancagaaaaacacangctcttctggtgaggaggataggtttcctcttccttgggtcatcctattgttggcacaagtcaaagtttttggccgggatttanaaagccccttccaggtgtgagcanaagcccaaaanggccancagggaaccccaaattgtcccaaacttttgttgcaaaaganatttgggggaacattntcantcattcaggctggcttanacaaccanggangcaaaaatgccttggtgggggagntgttcctttggnttccttattccannncttccattttaattttnaacttcccggagnatcccttttgnaagnccntttcncctcttttnatcatttncaannaaanntttttccancctactntntccggcttaaccttttttnttnttggngggggnnattccctttcnnttanttaaaaacccnanttnnggcccncncctcaantttttttnttaacctnnntttgnccccntgnccnancntnggctngataaatngggngggnnatttncccatncnacannctnttttannattt

SEQ ID NO: 471 - DNA, 552 bp, Homo sapiens
  misc_feature (287)..(287): n is a, c, g, or t
  misc_feature (328)..(328): n is a, c, g, or t
  misc_feature (348)..(348): n is a, c, g, or t
  misc_feature (366)..(366): n is a, c, g, or t
  misc_feature (373)..(373): n is a, c, g, or t
  misc_feature (393)..(393): n is a, c, g, or t
  misc_feature (414)..(414): n is a, c, g, or t
  misc_feature (417)..(417): n is a, c, g, or t
  misc_feature (419)..(419): n is a, c, g, or t
  misc_feature (435)..(435): n is a, c, g, or t
  misc_feature (452)..(452): n is a, c, g, or t
  misc_feature (459)..(459): n is a, c, g, or t
  misc_feature (464)..(464): n is a, c, g, or t
  misc_feature (478)..(478): n is a, c, g, or t
  misc_feature (486)..(486): n is a, c, g, or t
  misc_feature (491)..(492): n is a, c, g, or t
  misc_feature (496)..(496): n is a, c, g, or t
  misc_feature (498)..(498): n is a, c, g, or t
  misc_feature (500)..(500): n is a, c, g, or t
  misc_feature (509)..(509): n is a, c, g, or t
  misc_feature (520)..(520): n is a, c, g, or t
  misc_feature (530)..(530): n is a, c, g, or t
  misc_feature (533)..(533): n is a, c, g, or t
  misc_feature (537)..(537): n is a, c, g, or t
atcccaggaaaatttggaggaacagctgctctccactggcctgctcctgcaagaatgccctggagcttctgaagaaggatctatatttaccttatagggccttaagtcctgggatggaactatatactttggccgcgatgatgtggctttgaagaactttgccaaatactttcttcaccaatctcatgaggagagggaacatgctgagaaactgatgaagctgcagaaccaacgaggtggccgaatcttccttcaggatatcaagaaaccagactgtgattgactgngagagccgggctgaatgcaatggagtgtgcattaccatttnggaaaaaaaatgtgaatcantcacttactgggacctgnacaactngccaactgacaaaaatgacncccatttgtgtgactttattnganancattacctggaatganccggtgaaaaacccttnaaagaantttgngtgaccacatttcncaaaattncacannaatngnangccccccgnatatggcttgnataggaatantcntttntgacaagcacaccct

SEQ ID NO: 472 - DNA, 480 bp, Homo sapiens
  misc_feature (165)..(165): n is a, c, g, or t
  misc_feature (223)..(223): n is a, c, g, or t
  misc_feature (300)..(300): n is a, c, g, or t
  misc_feature (302)..(302): n is a, c, g, or t
  misc_feature (307)..(307): n is a, c, g, or t
  misc_feature (309)..(309): n is a, c, g, or t
  misc_feature (335)..(335): n is a, c, g, or t
  misc_feature (363)..(364): n is a, c, g, or t
  misc_feature (366)..(366): n is a, c, g, or t
  misc_feature (372)..(372): n is a, c, g, or t
  misc_feature (382)..(382): n is a, c, g, or t
  misc_feature (405)..(405): n is a, c, g, or t
  misc_feature (417)..(417): n is a, c, g, or t
  misc_feature (421)..(421): n is a, c, g, or t
  misc_feature (423)..(423): n is a, c, g, or t
  misc_feature (426)..(427): n is a, c, g, or t
  misc_feature (435)..(435): n is a, c, g, or t
  misc_feature (444)..(445): n is a, c, g, or t
  misc_feature (452)..(452): n is a, c, g, or t
  misc_feature (460)..(460): n is a, c, g, or t
  misc_feature (463)..(463): n is a, c, g, or t
  misc_feature (473)..(473): n is a, c, g, or t
gggtaccaaatttctttatttgaaggaatggtacaaatcaaagaacttaagtggatgttttggtacaacttatagaaaaggtaaaggaaaccccaacatgcatgcactgccttggtgaccagggaagtcaccccacggctatggggaaattagcccgaggcttanctttcattatcactgtctcccagggtgtgcttgtcaaagaaatattccgccaagccanattcgggcgctcccatcttgcgcaagttggtcaccgtggtcacccaattctttgatggctttcacctgctcattcangnaatgngnctcaatgaagtcacacaaatgggggncatttttgtcagtggccagtttgggcanntncagtantgactgattnacattttttttccaatggaatgnacacttcattgnattnanccnnttttccancattaaaanntgggttnttgatatnctnaagaaaaatnggccccc

SEQ ID NO: 473 - DNA, 401 bp, Homo sapiens
agaaattgaaacctggcgcaatagatatagtaccgcaagggaaagatgaaaaattataaccaagcataatatagcaaggactaacccctataccttctgcataatgaattaactagaaataactttgcaaggagagccaaagctaagacccccgaaaccagacgagctacctaagaacagctaagagagcacacccgtctatgtagcaaaatagtgggaagatttataggtagaggcgacaaacctaccgagcctggtgatagctggttgtccaagatagaatcttagttcaactttaaatttgcccacagaaccctctaaatccccttgtaaatttaactgttaagtccaaagaggaacagctctttggacactaggaaaaaaccttgtagagaagaagt

SEQ ID NO: 474 - DNA, 412 bp, Homo sapiens
  misc_feature (354)..(354): n is a, c, g, or t
  misc_feature (381)..(381): n is a, c, g, or t
gttaaattttttactctctctacaaggttttttcctagtgtccaaagagctgttcctctttggactaacagttaaatttacaaggggatttagagggttctgtgggcaaatttaaagttgaactaagattctatcttggacaaccagctatcaccaggctcggtaggtttgtcgcctctacctataaatcttcccactattttgctacatagacgggtgtgctctcttagctgttcttaggtagctcgtctggtttcgggggtcttagctttggctctccttgcaaagttatttctagttaattcattatgcagaaggtataggggttaagtccttgctatattatgcttgggntataatttttcatctttcccttgcggnactatatctattgcgccaggtttcaatttct

SEQ ID NO: 475 - DNA, 497 bp, Homo sapiens
caaacccactccaccttactaccagacaaccttagccaaaccatttacccaaataaagtataggcgatagaaattgaaacctggcgcaatagatatagtaccgcaagggaaagatgaaaaattatagccaagcataatatagcaaggactaacccctataccttctgcataatgaattaactagaaataactttgcaaggagagccaaagctaagacccccgaaaccagacgagctacctaagaacagctaaaagagcacacccgtctatgtagcaaaatagtgggaagatttataggtagaggcgacaaacctaccgagcctggtgatagctggttgtccaagatagaatcttagttcaactttaaatttgcccacagaaccctctaaatccccttgtaaatttaactgttagtccaaagaggaacagctctttggacactaggaaaaaaccttgtagagagagtaaaaaattaacacccatagtaggcctaaaag

SEQ ID NO: 476 - DNA, 497 bp, Homo sapiens
  misc_feature (400)..(400): n is a, c, g, or t
  misc_feature (470)..(470): n is a, c, g, or t
  misc_feature (479)..(479): n is a, c, g, or t
  misc_feature (485)..(485): n is a, c, g, or t
gcttttaggcctactatgggtgttaaattttttactctctctacaaggttttttcctagtgtccaaagagctgttcctctttggactaacagttaaatttacaaggggatttagagggttctgtgggcaaatttaaagttgaactaagattctatcttggacaaccagctatcaccaggctcggtaggtttgtcgcctctacctataaatcttcccactattttgctacatagacgggtgtgctcttttagctgttcttaggtagctcgtctggtttcgggggtcttagctttggctctccttgcaaagttatttctagttaattcattatgcagaaggtataggggttagtccttgctatattatgcttggctataatttttcatctttcccttgcggnactatatctattgcgccaggtttcaatttctatcgcctatactttatttgggtaaatggttggctaaggntgctggtantaaggnggagtgggtttg

SEQ ID NO: 477 - DNA, 841 bp, Homo sapiens
  misc_feature (345)..(345): n is a, c, g, or t
  misc_feature (440)..(440): n is a, c, g, or t
  misc_feature (449)..(449): n is a, c, g, or t
  misc_feature (474)..(474): n is a, c, g, or t
  misc_feature (479)..(479): n is a, c, g, or t
  misc_feature (486)..(486): n is a, c, g, or t
  misc_feature (509)..(509): n is a, c, g, or t
  misc_feature (532)..(532): n is a, c, g, or t
  misc_feature (554)..(554): n is a, c, g, or t
  misc_feature (559)..(559): n is a, c, g, or t
  misc_feature (581)..(581): n is a, c, g, or t
  misc_feature (608)..(608): n is a, c, g, or t
  misc_feature (616)..(617): n is a, c, g, or t
  misc_feature (631)..(631): n is a, c, g, or t
  misc_feature (648)..(648): n is a, c, g, or t
  misc_feature (663)..(663): n is a, c, g, or t
  misc_feature (665)..(665): n is a, c, g, or t
  misc_feature (672)..(672): n is a, c, g, or t
  misc_feature (675)..(675): n is a, c, g, or t
  misc_feature (679)..(679): n is a, c, g, or t
  misc_feature (690)..(690): n is a, c, g, or t
  misc_feature (703)..(703): n is a, c, g, or t
  misc_feature (705)..(705): n is a, c, g, or t
  misc_feature (712)..(712): n is a, c, g, or t
  misc_feature (715)..(715): n is a, c, g, or t
  misc_feature (747)..(747): n is a, c, g, or t
  misc_feature (758)..(759): n is a, c, g, or t
  misc_feature (763)..(763): n is a, c, g, or t
  misc_feature (767)..(767): n is a, c, g, or t
  misc_feature (774)..(774): n is a, c, g, or t
  misc_feature (783)..(783): n is a, c, g, or t
  misc_feature (787)..(787): n is a, c, g, or t
  misc_feature (794)..(795): n is a, c, g, or t
  misc_feature (800)..(800): n is a, c, g, or t
  misc_feature (805)..(808): n is a, c, g, or t
  misc_feature (813)..(813): n is a, c, g, or t
  misc_feature (817)..(817): n is a, c, g, or t
agatcgttatgcccgagttccggtacaggaacgtcggtcatccagatgccctcttccgctttcagtttggataacgctttcatctcacatcctcaggcgataacgcccagttgtttaccaatacgcgtaaatgcttctactgcacgcgtaatttgctcaggggtatgcgccgcagacatctgggtacgaatacgcgcctgacctttcggaacgaccggatagaagaaaccggtaacgtaaatgccctctttttgcagctcacgggcaaatttctgcgccactaccgcatcaccaagcatgaccggaataatggcgtgatcggttccgcagggtaaagcccgccgncgacatttgctcacggaactgacgcgcgttcgccacagacggtcacgcagttcgctgcccgcttcgaccatcttcagtactttgatggacgccgnaacaatggncggtgccagcgaatttggagaacangtacngaccaanaaccttggcgcaagccactcaancactttttttgcgcgcccgcggnataaccccccagaagccccggnccaangcttttaccaagcgtacccggngataatatttgaacccgggccattaanattgcaanntttattgggaaccncgaacatttttaaccgncaaaaaccaaccccntnggaaatnttngccnccaattcccangggggaaattttngnaaattcnttnaaactggggggccgtttaacatgccttttaangggcccaattnncccnttanggggcgnttacaaatnactnggccggnnttttnaaacnnnngaatngggnaaacccgggggttcccaacttaaa

SEQ ID NO: 478 - DNA, 930 bp, Homo sapiens; identical to SEQ ID NO: 464
  misc_feature (641)..(641): n is a, c, g, or t
  misc_feature (648)..(648): n is a, c, g, or t
  misc_feature (676)..(676): n is a, c, g, or t
  misc_feature (704)..(704): n is a, c, g, or t
  misc_feature (710)..(710): n is a, c, g, or t
  misc_feature (715)..(715): n is a, c, g, or t
  misc_feature (750)..(750): n is a, c, g, or t
  misc_feature (761)..(761): n is a, c, g, or t
  misc_feature (764)..(764): n is a, c, g, or t
  misc_feature (769)..(769): n is a, c, g, or t
  misc_feature (795)..(795): n is a, c, g, or t
  misc_feature (823)..(823): n is a, c, g, or t
  misc_feature (826)..(826): n is a, c, g, or t
  misc_feature (834)..(834): n is a, c, g, or t
  misc_feature (841)..(841): n is a, c, g, or t
  misc_feature (846)..(846): n is a, c, g, or t
  misc_feature (850)..(850): n is a, c, g, or t
  misc_feature (855)..(856): n is a, c, g, or t
  misc_feature (874)..(875): n is a, c, g, or t
  misc_feature (878)..(878): n is a, c, g, or t
  misc_feature (889)..(890): n is a, c, g, or t
  misc_feature (894)..(894): n is a, c, g, or t
  misc_feature (905)..(905): n is a, c, g, or t
  misc_feature (911)..(911): n is a, c, g, or t
  misc_feature (921)..(921): n is a, c, g, or t
  misc_feature (923)..(923): n is a, c, g, or t

SEQ ID NO: 479 - DNA, 221 bp, Homo sapiens
  misc_feature (5)..(5): n is a, c, g, or t
  misc_feature (11)..(11): n is a, c, g, or t
  misc_feature (16)..(16): n is a, c, g, or t
  misc_feature (24)..(24): n is a, c, g, or t
  misc_feature (33)..(33): n is a, c, g, or t
  misc_feature (37)..(37): n is a, c, g, or t
  misc_feature (41)..(41): n is a, c, g, or t
  misc_feature (44)..(44): n is a, c, g, or t
  misc_feature (55)..(55): n is a, c, g, or t
  misc_feature (63)..(63): n is a, c, g, or t
  misc_feature (70)..(70): n is a, c, g, or t
  misc_feature (72)..(72): n is a, c, g, or t
  misc_feature (74)..(74): n is a, c, g, or t
  misc_feature (76)..(76): n is a, c, g, or t
  misc_feature (86)..(86): n is a, c, g, or t
  misc_feature (89)..(89): n is a, c, g, or t
  misc_feature (94)..(94): n is a, c, g, or t
  misc_feature (98)..(98): n is a, c, g, or t
  misc_feature (100)..(100): n is a, c, g, or t
  misc_feature (102)..(102): n is a, c, g, or t
  misc_feature (104)..(104): n is a, c, g, or t
  misc_feature (117)..(117): n is a, c, g, or t
  misc_feature (119)..(119): n is a, c, g, or t
  misc_feature (121)..(121): n is a, c, g, or t
  misc_feature (125)..(125): n is a, c, g, or t
  misc_feature (137)..(137): n is a, c, g, or t
  misc_feature (139)..(139): n is a, c, g, or t
  misc_feature (143)..(143): n is a, c, g, or t
  misc_feature (146)..(146): n is a, c, g, or t
  misc_feature (160)..(160): n is a, c, g, or t
  misc_feature (164)..(164): n is a, c, g, or t
  misc_feature (166)..(166): n is a, c, g, or t
  misc_feature (169)..(169): n is a, c, g, or t
  misc_feature (171)..(171): n is a, c, g, or t
  misc_feature (179)..(179): n is a, c, g, or t
  misc_feature (184)..(184): n is a, c, g, or t
  misc_feature (186)..(186): n is a, c, g, or t
  misc_feature (194)..(195): n is a, c, g, or t
  misc_feature (197)..(197): n is a, c, g, or t
  misc_feature (201)..(201): n is a, c, g, or t
  misc_feature (208)..(208): n is a, c, g, or t
  misc_feature (212)..(212): n is a, c, g, or t
ccagntgaccnccggncgttaccnttaccagtnggtntggngtnaaaaataatantaaccggncaggccntntnangggcaaattntgnaaatntccntnanantggcggccgttcnancntgcntttaaagggccnanttcnccntatagggagtcgtnttananttnantggccgtngtttnanaacgtcgnnantggnaaaaccntggngttacccaa

SEQ ID NO: 480 - DNA, 1002 bp, Homo sapiens; identical to SEQ ID NO: 454
  misc_feature (510)..(510): n is a, c, g, or t
  misc_feature (616)..(616): n is a, c, g, or t
  misc_feature (620)..(620): n is a, c, g, or t
  misc_feature (634)..(634): n is a, c, g, or t
  misc_feature (646)..(646): n is a, c, g, or t
  misc_feature (657)..(657): n is a, c, g, or t
  misc_feature (665)..(665): n is a, c, g, or t
  misc_feature (668)..(668): n is a, c, g, or t
  misc_feature (755)..(755): n is a, c, g, or t
  misc_feature (757)..(757): n is a, c, g, or t
  misc_feature (784)..(785): n is a, c, g, or t
  misc_feature (804)..(804): n is a, c, g, or t
  misc_feature (809)..(809): n is a, c, g, or t
  misc_feature (814)..(814): n is a, c, g, or t
  misc_feature (816)..(816): n is a, c, g, or t
  misc_feature (818)..(819): n is a, c, g, or t
  misc_feature (824)..(824): n is a, c, g, or t
  misc_feature (831)..(831): n is a, c, g, or t
  misc_feature (837)..(837): n is a, c, g, or t
  misc_feature (839)..(839): n is a, c, g, or t
  misc_feature (844)..(844): n is a, c, g, or t
  misc_feature (859)..(859): n is a, c, g, or t
  misc_feature (881)..(881): n is a, c, g, or t
  misc_feature (887)..(888): n is a, c, g, or t
  misc_feature (890)..(890): n is a, c, g, or t
  misc_feature (894)..(896): n is a, c, g, or t
  misc_feature (900)..(900): n is a, c, g, or t
  misc_feature (913)..(913): n is a, c, g, or t
  misc_feature (923)..(923): n is a, c, g, or t
  misc_feature (926)..(926): n is a, c, g, or t
  misc_feature (932)..(932): n is a, c, g, or t
  misc_feature (935)..(935): n is a, c, g, or t
  misc_feature (945)..(945): n is a, c, g, or t
  misc_feature (957)..(958): n is a, c, g, or t
  misc_feature (960)..(960): n is a, c, g, or t
  misc_feature (976)..(976): n is a, c, g, or t
  misc_feature (982)..(983): n is a, c, g, or t
  misc_feature (988)..(988): n is a, c, g, or t
  misc_feature (994)..(994): n is a, c, g, or t

SEQ ID NO: 481 - DNA, 325 bp, Homo sapiens
  misc_feature (6)..(6): n is a, c, g, or t
  misc_feature (18)..(19): n is a, c, g, or t
  misc_feature (25)..(26): n is a, c, g, or t
  misc_feature (29)..(29): n is a, c, g, or t
  misc_feature (42)..(42): n is a, c, g, or t
  misc_feature (52)..(52): n is a, c, g, or t
  misc_feature (63)..(63): n is a, c, g, or t
  misc_feature (66)..(66): n is a, c, g, or t
  misc_feature (70)..(70): n is a, c, g, or t
  misc_feature (73)..(73): n is a, c, g, or t
  misc_feature (92)..(95): n is a, c, g, or t
  misc_feature (108)..(108): n is a, c, g, or t
  misc_feature (117)..(117): n is a, c, g, or t
  misc_feature (155)..(155): n is a, c, g, or t
  misc_feature (157)..(157): n is a, c, g, or t
  misc_feature (178)..(178): n is a, c, g, or t
  misc_feature (194)..(194): n is a, c, g, or t
  misc_feature (197)..(197): n is a, c, g, or t
  misc_feature (215)..(215): n is a, c, g, or t
  misc_feature (222)..(222): n is a, c, g, or t
  misc_feature (232)..(232): n is a, c, g, or t
  misc_feature (236)..(236): n is a, c, g, or t
  misc_feature (255)..(255): n is a, c, g, or t
  misc_feature (269)..(269): n is a, c, g, or t
  misc_feature (273)..(273): n is a, c, g, or t
  misc_feature (276)..(276): n is a, c, g, or t
  misc_feature (283)..(284): n is a, c, g, or t
  misc_feature (287)..(287): n is a, c, g, or t
  misc_feature (289)..(289): n is a, c, g, or t
  misc_feature (291)..(291): n is a, c, g, or t
  misc_feature (297)..(297): n is a, c, g, or t
  misc_feature (302)..(303): n is a, c, g, or t
  misc_feature (313)..(313): n is a, c, g, or t
gaggcncaggtgggggtnnttacanngtnatgatgattaatnaccattctgnccaacatggtnaancccngtntctactaaaatccaaaaannnnaaaattagccggncaaggtggngcatgcctgtagtcccagctactggactacaggctgantnagggaatcccttgaacccggnaggtggcggttgcagnganctgagatcactgcactcnatccagnctgctgacanatcnagactatgcctcaaaaaanggggtttaaccatnttgnccnaaaaggnnttnanancctaancttgnnaaaacccccntgatggccgttc

SEQ ID NO: 482 - DNA, 234 bp, Homo sapiens
  misc_feature (3)..(3): n is a, c, g, or t
  misc_feature (5)..(6): n is a, c, g, or t
  misc_feature (15)..(15): n is a, c, g, or t
  misc_feature (18)..(18): n is a, c, g, or t
  misc_feature (20)..(21): n is a, c, g, or t
  misc_feature (23)..(23): n is a, c, g, or t
  misc_feature (25)..(25): n is a, c, g, or t
  misc_feature (27)..(27): n is a, c, g, or t
  misc_feature (32)..(32): n is a, c, g, or t
  misc_feature (42)..(42): n is a, c, g, or t
  misc_feature (55)..(55): n is a, c, g, or t
  misc_feature (57)..(59): n is a, c, g, or t
  misc_feature (64)..(64): n is a, c, g, or t
  misc_feature (81)..(81): n is a, c, g, or t
  misc_feature (84)..(84): n is a, c, g, or t
  misc_feature (86)..(86): n is a, c, g, or t
  misc_feature (89)..(89): n is a, c, g, or t
  misc_feature (92)..(93): n is a, c, g, or t
  misc_feature (98)..(99): n is a, c, g, or t
  misc_feature (104)..(105): n is a, c, g, or t
  misc_feature (108)..(108): n is a, c, g, or t
  misc_feature (110)..(111): n is a, c, g, or t
  misc_feature (113)..(113): n is a, c, g, or t
  misc_feature (115)..(115): n is a, c, g, or t
  misc_feature (118)..(118): n is a, c, g, or t
  misc_feature (121)..(122): n is a, c, g, or t
  misc_feature (124)..(124): n is a, c, g, or t
  misc_feature (131)..(131): n is a, c, g, or t
  misc_feature (134)..(134): n is a, c, g, or t
  misc_feature (138)..(138): n is a, c, g, or t
  misc_feature (140)..(141): n is a, c, g, or t
  misc_feature (143)..(143): n is a, c, g, or t
  misc_feature (146)..(146): n is a, c, g, or t
  misc_feature (148)..(148): n is a, c, g, or t
  misc_feature (151)..(151): n is a, c, g, or t
  misc_feature (154)..(154): n is a, c, g, or t
  misc_feature (157)..(157): n is a, c, g, or t
  misc_feature (160)..(160): n is a, c, g, or t
  misc_feature (162)..(162): n is a, c, g, or t
  misc_feature (168)..(168): n is a, c, g, or t
  misc_feature (184)..(185): n is a, c, g, or t
  misc_feature (189)..(190): n is a, c, g, or t
  misc_feature (192)..(192): n is a, c, g, or t
  misc_feature (194)..(194): n is a, c, g, or t
  misc_feature (201)..(201): n is a, c, g, or t
  misc_feature (203)..(203): n is a, c, g, or t
  misc_feature (207)..(208): n is a, c, g, or t
  misc_feature (212)..(212): n is a, c, g, or t
  misc_feature (221)..(221): n is a, c, g, or t
  misc_feature (223)..(223): n is a, c, g, or t
ccnannctgacgggntcnannantngnccccnccaatcccangggcaaattccancnnnctggnggccgttactagggganccnanctnggnnccaannttganncananntngngtnttnnanaggggcnccnaaananntnggngnaancanggncananctgttncctggggaaaattgtnntccnntnanaattccncncaanntacnacccggaancntaaagggtaaa

SEQ ID NO: 483 - DNA, 706 bp, Homo sapiens
  misc_feature (650)..(650): n is a, c, g, or t
  misc_feature (691)..(691): n is a, c, g, or t
  misc_feature (694)..(694): n is a, c, g, or t
  misc_feature (700)..(700): n is a, c, g, or t
ggttcccatgaatactgcgatgtgatgggccgggtcgatattatcaccggtacgcttggtaaagcgctgggcggggcttctggtggttataccgcggcgcgcaaagaagtggttgagtggctgcgccagcgttctcgtccgtacctgttctccaactcgctggcaccggccattgttgccgcgtccatcaaagtactggagatggtcgaagcgggcagcgaactgcgtgaccgtctgtgggcgaacgcgcgtcagttccgtgagcaaatgtcggcggcgggctttaccctggcgggagccgatcacgccattattccggtcatgcttggtgatgcggtagtggcgcagaaatttgcccgtgagctgcaaaaagagggcatttacgttaccggtttcttctatccggtcgttccgaaaggtcaggcgcgtattcgtacccagatgtctgcggcgcatacccctgacaaattacgcgtgcagtagaagcatttacgcgtattggtaaacaactgggccgttatcgcctgaggatgtgagatgaaagcgttatccaaactgaaaagcggaagaggcattttggatgaccgacgttctgtaccggaactcggcataacgaatctggttgattaaaagtccgtaaacagccattntgcgggaatgacgttcacatttataactggggataagtctngcnccaatnccaagg

SEQ ID NO: 484 - DNA, 467 bp, Homo sapiens
  misc_feature (380)..(380): n is a, c, g, or t
  misc_feature (382)..(382): n is a, c, g, or t
  misc_feature (410)..(410): n is a, c, g, or t
ccggcccgtctcgcccgccgcgccggggaggtggagcacgagcgcacgtgttaggacccgaaagatggtgaactatgcctgggcagggcgaagccagaggaaactctggtggaggtccgtagcggtcctgacgtgcaaatcggtcgtccgacctgggtataggggcgaaagactaatcgaaccatctagtagctggttccctccgaagtttccctcaggatagctggcgctctcgcagacccgacgcacccccgccacgcagttttatccggtaaagcgaatgattagaggtcttggggccgaaacgatctcaacctattctcaaactttaaatgggtaaagaagcccggctcgctggcgtggagccggcgtggaatgcnantgcctaatgggccacttttggtaagcanaactggcgcttggggatgaaccgaacgccgggttaaggggcccgatgccgacctcat

SEQ ID NO: 485 - DNA, 540 bp, Homo sapiens
  misc_feature (494)..(494): n is a, c, g, or t
aaggaatcgtatcgtatgtccgctatccagaacctccactctttcgacccctttgctgatgcaagtaagggtgatgacctgcttcctgctggcactgaggattatatccatataagaattcaacagagaaacggcaggaagacccttactactgtccaagggatcgctgatgattacgataaaaagaaactagtgaaggcgtttaagaaaaagtttgcctgcaatggtactgtaattgagcatccggaatatggagaagtaattcagctacagggtgaccaacgcaagaacatatgccagttcctcgtagagattggactggctaaggacgatcagctgaaggttcatgggttttaagtgcttgtggctcactgaagcttaagtgaggatttccttgcaatgagtagaatttcccttctctcccttgtcacaggtttaaaaacctccagcttgtataatgtaaccatttggggtcccgcttttacttggactantgtaactccttcgtgccataaactgaaacagccatgctgctatctt

SEQ ID NO: 486 - DNA, 513 bp, Homo sapiens
  misc_feature (384)..(384): n is a, c, g, or t
  misc_feature (441)..(441): n is a, c, g, or t
  misc_feature (451)..(451): n is a, c, g, or t
  misc_feature (468)..(468): n is a, c, g, or t
  misc_feature (473)..(473): n is a, c, g, or t
  misc_feature (484)..(484): n is a, c, g, or t
  misc_feature (488)..(488): n is a, c, g, or t
ctgaaaacaagttttatttaaataagggtttaaatacattacacataacattaaaactgaaggggaaaaaaaaaccaaaaaccagtttgttacttcacatggcattgggcagctgctgctattaagttgcaagctctacagctagctacatgactgatggatcagtttgagatttgttcccttgtcaaaagtttaactctgatagaaggttggcctcacattctgatgtttggacatcccttagctaggatatgtctggtcgaacagacctttgtggcaagccagatgtcctatcacctcgctagcggtaagagggcctctttgagctctgtccacctagtcaggttggagacaccaggggatctaccaccaaaagctcccttntagtagtacagctgggcttctgccttaccccatcctctccttttaaaattcaccgangactgttcangtggtaacattctttanggtanggaactcttgnaaanggagagctgaggaggttcccgccag

SEQ ID NO: 487 - DNA, 533 bp, Homo sapiens
  misc_feature (363)..(363): n is a, c, g, or t
  misc_feature (427)..(427): n is a, c, g, or t
  misc_feature (430)..(430): n is a, c, g, or t
  misc_feature (453)..(453): n is a, c, g, or t
  misc_feature (481)..(481): n is a, c, g, or t
  misc_feature (495)..(495): n is a, c, g, or t
  misc_feature (499)..(499): n is a, c, g, or t
  misc_feature (518)..(518): n is a, c, g, or t
  misc_feature (521)..(522): n is a, c, g, or t
  misc_feature (524)..(524): n is a, c, g, or t
  misc_feature (530)..(530): n is a, c, g, or t
gtggagtctgacttagcaagcctcgggtgggtttgagggtcaaatttctaccaggcttatatccctggtgatgctgcagaattccaggaccacacttggaggtttaaggccttccacaagttacttatcccatatggtgggtctatggaaaggtgtttcccagtcctctttacaccaccggatcagtggtctttcaacagatcctaaagggatggtgagagggaaactggagaaaagtatcagatttagaggccactgaagaacccatattaaaatgcctttaagtatgggctcttcattcatatactaaatatgaactatgtgccaggcattatttcatatgacagaatacaaacaaataanatagtgatgctggtcaggcttggtggctcatgcctgtattccctaaactttgggagcctaaggnganaactccttgaactcctaaggccnggaattcaagaccacctggataacatancaagaccccttctntccnaaaaccaaacccaaccaancannantgaaanggg

SEQ ID NO: 488 - DNA, 161 bp, Homo sapiens; identical to SEQ ID NO: 407
  misc_feature (106)..(106): n is a, c, g, or t
  misc_feature (111)..(111): n is a, c, g, or t
  misc_feature (142)..(142): n is a, c, g, or t
  misc_feature (147)..(147): n is a, c, g, or t
  misc_feature (149)..(150): n is a, c, g, or t
  misc_feature (155)..(156): n is a, c, g, or t
  misc_feature (160)..(160): n is a, c, g, or t

SEQ ID NO: 489 - DNA, 533 bp, Homo sapiens
  misc_feature (483)..(483): n is a, c, g, or t
  misc_feature (499)..(499): n is a, c, g, or t
  misc_feature (519)..(519): n is a, c, g, or t
  misc_feature (530)..(530): n is a, c, g, or t
gccgaggatggccgtcatggcgccccgaaccctcgtcctgctactctcgggggccctggccctgacccagacctgggcaggctcccactccatgaggtatttctccacatccgtgtcccggcccggccgcggggagccccgcttcatcgccgtgggctacgtggacgacacgcagttcgtgtggttcgacagcgacgccgcgagccagaggatggagccgcgggcgccgtggatagagcaggaggggccggagtattgggacgaggagacagggaaagtgaaggcccactcacagactgaccgagagaacctgcggatcgcgctccgctactacaaccagagcgaggccggttctcacaccctccagatgacgtttggctgcgacgtggggtcggacgggcgcttcctccgcgggtaccaccagtaccctacgacggcaaggattacatcgcctgaaagaagacctgcctcttggaccggggnggacatggcggttaanataacaaacgcaagtgggangcgggccatgnggg

SEQ ID NO: 490 - DNA, 116 bp, Homo sapiens
  misc_feature (73)..(73): n is a, c, g, or t
  misc_feature (82)..(82): n is a, c, g, or t
  misc_feature (87)..(87): n is a, c, g, or t
  misc_feature (90)..(90): n is a, c, g, or t
  misc_feature (106)..(106): n is a, c, g, or t
gatgattggggagggagcacaggtcagcgtgggaagagggtcatggtggacatgggggtggggtggtgctaanacaaggtanagtanganatacttttcttacctntttatgctga

SEQ ID NO: 491 - DNA, 567 bp, Homo sapiens
  misc_feature (529)..(529): n is a, c, g, or t
cttcaacaagatagaaatcaataacaagctggaatttgagtctgcccagttccccaactggtacatcagcacctctcaagcagaaaacatgcccgtcttcctgggagggaccaaaggcggccaggatataactgacttcaccatgcaatttgtgtcttcctaaagagagctgtacccagagagtcctgtgctgaatgtggactcaatccctagggctggcagaaagggaacagaaaggtttttgagtacggctatagcctggactttcctgttgtctacaccaatgcccaactgcctgccttagggtagtgctaagaggatctcctgtccatcagccaggacagtcagctctctcctttcagggccaatccccagcccttttgttgagccaggcctctctcacctctcctactcacttaaagcccgcctgacagaaaccacggccacatttggttctaagaaaccctcttgtcattcgctcccacattctgatgagcaacccgtttcctattaattaattaatttggtnggttggtttattcattggctaatttattcaaagggggg

SEQ ID NO: 492 - DNA, 492 bp, Homo sapiens
  misc_feature (274)..(274): n is a, c, g, or t
  misc_feature (306)..(306): n is a, c, g, or t
  misc_feature (408)..(408): n is a, c, g, or t
cagggaagtttatttcaaaaccattgaacagtatgatatttgctcatttataaatattcccatttaaataatctgagcttatatattttcagtcttaattaaaggacttgatttaaagagagcacaccagtccaaattgaattgattccatagctattaaaaactaggctcttttacagacactgctacttcttgccccctttgaataaattagaccaatgaataaaacaaacaaacaaataaataaataaatagggaagcggttgctcatcanaatgtgggagcgaatgacagagggtttcttanaaccaaatgtggcccgtggtttctgtcaggcggctttaagtgagtaggaaaggtgagagaggcctgctcaacaaaagggctggggattggccctgaaagganaaagctgactgcctgctgatggacaggaaatcctttacactaccctaaggcaggcagtaggcattgggtaaacacaggaagacg

SEQ ID NO: 493 - DNA, 567 bp, Homo sapiens
  misc_feature (423)..(423): n is a, c, g, or t
  misc_feature (505)..(505): n is a, c, g, or t
  misc_feature (525)..(525): n is a, c, g, or t
cgttcatggggaataattgcaatccccgatccccatcacgaatggggttcaacgggttacccgcgcctgccggcgtagggtaggcacacgctgagccagtcagtgtagcgcgcgtgcagccccggacatctaagggcatcacagacctgttattgctcaatctcgggtggctgaacgccacttgtccctctaagaagttgggggacgccgaccgctcgggggtcgcgtaactagttagcatgccagagtctcgttcgttatcggaattaaccagacaaatcgctccaccaactaagaacggccatgcaccaccacccacggaatcgagaaagagctatcaatctgtcaatcctgtccgtgtccgggccgggtgaaggcagtgagctgagattgcgccactgcactccagcctgggcgacagancgagaccccatctcaaaaaaaaagggggggggtggacagggggcaagtggagtctggcttgccaaaactacttgttgatggnggggaaaaaaaaatgggtgncttcctccttggcactgggaaaggttttggttcttttttcat

SEQ ID NO: 494 - DNA, 512 bp, Homo sapiens
  misc_feature (471)..(471): n is a, c, g, or t
gaaagtttagaaactttaaaacaataataatgacggtgatagtgataataattgctaatgctttcagatcacatatgtgttaggcgctgttttttgttgttgttgttattgttgagacagtctcactctgttggccaggctggagtgcagtggtgctttgcctcctgggttcaagggattctcctgcctcagcctcctgagtagctgggattacaggcatgcgccaccacgtcgggctaatttttgcatttttagtggagacggggtttcatcatgttggccaggctggtctcgaactcacgacgtcaagtgatccacctgcctcggcctcccaaagtgttgggattacaggcgtgagccaccatgcccagccagcactgtcttaaatgctttacatatattatctcatttaatcctcaaaataccttacaatatagatactactattatttccatttatattaatggcanctctgaggctcaaacgatgaactacttgctgggttacatga

SEQ ID NO: 495 - DNA, 572 bp, Homo sapiens
  misc_feature (567)..(567): n is a, c, g, or t
cccaaaaattacccaaagaagaagatggaaaagcgatttgtcttcaacaagatagaaatcaataacaagctggaatttgagtctgcccagttccccaactggtacatcagcacctctcaagcagaaaacatgcccgtcttcctgggagggaccaaaggcggccaggatataactgacttcaccatgcaatttgtgtcttcctaaagagagctgtacccagagagtcctgtgctgaatgtggactcaatccctagggctggcagaaagggaacagaaaggtttttgagtacggctatagcctggactttcctgttgtccacaccaatgcccaactgcctgccttaggggtagtgctaagaggatctcctgtccatcagccaggacagtcagctctctcctttcagggccaatccccagcccttttgttgagccaggcctctctcacctctcctactcacttaaagcccgctgacagaaaccacggccacatttggttctaagaaaccctctgtcattcgctcccacattctgatgagcaaccgttccctatttaattatttattggtngttgg

SEQ ID NO: 496 - DNA, 488 bp, Homo sapiens
  misc_feature (4)..(4): n is a, c, g, or t
  misc_feature (274)..(274): n is a, c, g, or t
  misc_feature (294)..(294): n is a, c, g, or t
  misc_feature (306)..(306): n is a, c, g, or t
  misc_feature (350)..(350): n is a, c, g, or t
  misc_feature (407)..(407): n is a, c, g, or t
  misc_feature (409)..(409): n is a, c, g, or t
  misc_feature (458)..(458): n is a, c, g, or t
  misc_feature (462)..(462): n is a, c, g, or t
  misc_feature (475)..(475): n is a, c, g, or t
gagngaagtttatttcaaaaccattgaacagtatgatatttgctcatttataaatattcccatttaaataatctgagcttatatattttcagtcttaattaaaggacttgatttaaagagagcacaccagtccaaattgaattgattccatagctattaaaaactaggctcttttacagacactgctacttcttgccccctttgaataaattagaccaatgaataaaacaaacaaacaaataaataaataaatagggaagcggttgctcatcanaatgtgggagcgaatgacanagggtttcttanaaccaaatgtggcccgtggtttctgtcaggcggctttaagtgantaggaaaggtgaaagaggcctgctcaacaaaagggctggggattgccctgaaaggananagctgactggcctgctgatggacaggaaacctttacactaccctaagcngcantggccattggtgnggacacaggaaag

SEQ ID NO: 497 - DNA, 560 bp, Homo sapiens
  misc_feature (380)..(380): n is a, c, g, or t
  misc_feature (543)..(543): n is a, c, g, or t
cggaatcccgaaaaaatcgcacatacattcctaaagtttatataaacaaggaaagaaaagaaggaaaagaaagccgaagagctttgatttttgaaaggaaagttttgagtacctgactgaacacccaacttgaactccgttcaacttgcctgaacaatccaacagctgactgctggaacaaggaaaggtaggcacagcaacaggcaggctaatgggatttctgaaacagatacagtaccctgccatgttctttcacctgcaagggggaggggtgtgtgtgtgtgtgtctgtgtatacaccgtaagtgctaaagtgcctgaaaggcacctgggaacagtacttaactgacaccaaggtaagagactgtcagttcagctganctaaggggaaaacggcaattaggtgtgccactgagattgctatgtgtaaggtcctccccttctcctgcaacttttcttctatttctttttcctttcacatgaaagcccctatgtcccacaccaaatgtcttaactgaaggaattccccttttcttaacaaggnagtttgaaaacggaggg

SEQ ID NO: 498 - DNA, 514 bp, Homo sapiens
  misc_feature (486)..(486): n is a, c, g, or t
  misc_feature (498)..(498): n is a, c, g, or t
gattccaaccttcacagataactgagtcttgatttgacttcaagacttcagtggaggaagtaactacaaatgtggtagaaatagctagataactagaagtggtggagcctgaagatctgactgaattgctgcagtctcatgattaaacttgaacagatgaggatttgcttcatatgggtggatacagaaagtggtttcttgagatgaaatctactgctggcagagatgctgtgaacatcgttgaaatgacaacaaaggacttcgaatatcagtaaaatcagttgataaaaccaaagcagggtttgagaggatgcactcccaattttgaaagaagttcttgtgtgggtgaacgctatcataccaaacagcatcgcaagctacagataaatctttcgtgatagagtcaattgacgtgacaaacttcattggtggcattttaaggcattgccacagtcaccccaaaacccgcagcagccatcaacaacnggcaagaccctncacaacaaaaagatga

SEQ ID NO: 499 - DNA, 531 bp, Homo sapiens
  misc_feature (403)..(403): n is a, c, g, or t
  misc_feature (480)..(480): n is a, c, g, or t
  misc_feature (512)..(512): n is a, c, g, or t
gtcgttttccagtttttctttattacttatttcattcaccataattccaaattttaatgaccatatctttcctaaaatatctacataaaaatcttgattatttaagagtaaaaagttggtttctcctctagctacttctgacctcttcaataaattgtgcctgatgctgcctcctttccttccaaccactcacattagaatccttttagtcaaagtagtctgaggctgcagttgtttgcaggatgtgatcatcctcaataccatattatttcagagtagcttaagtcaccattcctaggcaatttcatagtaaaaaaattattctaggaattcctggacctatagatatttccaagatcattacaaaaatacttctttttaaataaaaaaaaattgctaatgnaccatgctgggaaatttttatttaaaaaatagaactaaactcttgagcttcaataatgctggcagatagattctcanggccttctactggcctcaaggaaatgatggcncccctcagtttgggaaagg

SEQ ID NO: 500 - DNA, 539 bp, Homo sapiens
  misc_feature (385)..(385): n is a, c, g, or t
  misc_feature (396)..(396): n is a, c, g, or t
  misc_feature (441)..(441): n is a, c, g, or t
  misc_feature (446)..(446): n is a, c, g, or t
  misc_feature (489)..(489): n is a, c, g, or t
  misc_feature (518)..(518): n is a, c, g, or t
  misc_feature (528)..(528): n is a, c, g, or t
tttgtattataggaacctattttgaagctcttagagctgagagttaagtggtcttttaatggaactgctaagacaaggtagagtaggagatacttttcttccctctttatgctgaagtgttttagtgtttctgtctgtgactaggcagtaactttgaaagggataagatagggttaataacatatctactaaaacttggaaaatatactatattttctgagataaaaatctttggattgaaaattactttctggtggaatatggcaaactgacattcattcaatgtaagactttttttccctcactttttgtgttttcatctgtagtttttttttttcttttttacctgtggtaccatttttaaggtgaatcaggccagtttcancaaaaaatggntgtactgttcatcacttcagtagaaggtaggatgacttcgatganggtgngctcagtaacttctctggtgctgaattagggcctgggacaaanaaggatcccatcttacaaataatgacaanggagactacngaatccgggag

SEQ ID NO: 501 - DNA, 562 bp, Homo sapiens
  misc_feature (522)..(522): n is a, c, g, or t
cggaatccgttttaagatggagtgtcattctgtcacccaggttggagtgcagtggcgtgatcatggctcacagcaacctctgcctcccaggttcaagcaattctcctgcctcagcctcctgagtagctgggattacaggtgcccgccagcacgcccagctaatttttgtatttttagtagagacagggtttcaccatgttggccaggctggtctcgaacttttgacctcaggcgatccacctgtctccggaattcgggttacggcagcacttttatttttccttacacaatgacgtgttgctggggcctaatgttctcacataacagtagaaaaccaaaatttgttgtcatctcttcaaagaatcgagaattgcgtacaaaaaaaaccttacataaattaagaatgaatacatttacaggcgtaaatgcaaaccgcttccaactcaaagcaagtaacagcccacggtgttctggccaaagacatcactaagaaaggaaactgggtcctacggttggactttncaccctgacagacccgcaagacaaaacaactggttcttgc

SEQ ID NO: 502 - DNA, 506 bp, Homo sapiens
  misc_feature (441)..(441): n is a, c, g, or t
  misc_feature (486)..(486): n is a, c, g, or t
  misc_feature (489)..(489): n is a, c, g, or t
  misc_feature (502)..(502): n is a, c, g, or t
cggaggagcacccagtgctgctgaccgaggcccccctgaaccccaaggccaacagagagaagatgactcagattatgtttgagaccttcaacaccccggccatgtacgtggccatccaggccgtgctgtccctctacgcctctgggcgcaccactggcattgtcatggactctggagacggggtcacccacacggtgcccatctacgagggctacgccctcccccacgccatcctgcgtctggacctggctggccgggacctgaccgactacctcatgaagatcctcactgagcgaggctacagcttcaccaccacggccgagcgggaaatcgtgcgcgacatcaaggagaagctgtgctacgtcgccctggacttcgagcaggagatggccaccgccgcatctcctcttctctggagaaaactacgactgccgatggcangtcataccattggcatgagcggttcccgggtccggaggcgctgtncanccttcttctgggnatgg

SEQ ID NO: 503 - DNA, 445 bp, Homo sapiens
ctttactaaaaatacaaaaattagccaggcatggtggcaggtgcctgtaatcccagctattcgggaggctgaggcaggagaatcacttgaacccaggaagtggaggttgcagtgagccgagatcgtaccactgcactccacccagggtgacagagtgagactccgttgaaaaaaagagaaaaaaaaattaatacaaagatattaaaattaaaaaggaaaaatatccccagaaccccatcacttaaacaacaaatcaaatttttatttttctcttcccatcctacaaggcaacataactctgacctgcttagaatccccgtgtcaggccactttcctattctgtttcttcccactcctcaccgtgcccacacaccttccttgggggtgaacgcgtgcggacgctagacggcccctcatcccccgactgcctgcccgggtggaactg

SEQ ID NO: 504 - DNA, 445 bp, Homo sapiens
  misc_feature (331)..(331): n is a, c, g, or t
  misc_feature (338)..(338): n is a, c, g, or t
  misc_feature (344)..(344): n is a, c, g, or t
  misc_feature (432)..(432): n is a, c, g, or t
cagttccacccgggcaggcagtcgggggatgaggggccgtctagcgtccgcacgcgttcacccccaaggaaggtgtgtgggcacggtgaggagtgggaagaaacagaataggaaagtggcctgacacggggattctaagcaggtcagagttatgttgccttgtaggatgggaagagaaaaataaaaatttgatttgttgtttaagtgatggggttctggggatatttttcctttttaattttaatatctttgtattaatttttttttctctttttttcaacggagtctcactctgtcaccctgggtggagtgcaagtggtacgatctcggntcactgnaacctncacttcctgggttcaagtgattctcctgcctcacctcccgaatagctgggattacaggcacctgccaccatgcctggctaatttttgnatttttagtaaag

SEQ ID NO: 505 - DNA, 511 bp, Homo sapiens
  misc_feature (239)..(239): n is a, c, g, or t
  misc_feature (277)..(277): n is a, c, g, or t
  misc_feature (309)..(309): n is a, c, g, or t
  misc_feature (410)..(410): n is a, c, g, or t
  misc_feature (443)..(443): n is a, c, g, or t
  misc_feature (455)..(455): n is a, c, g, or t
  misc_feature (458)..(458): n is a, c, g, or t
  misc_feature (461)..(462): n is a, c, g, or t
  misc_feature (476)..(476): n is a, c, g, or t
  misc_feature (482)..(482): n is a, c, g, or t
  misc_feature (486)..(486): n is a, c, g, or t
  misc_feature (491)..(491): n is a, c, g, or t
  misc_feature (494)..(494): n is a, c, g, or t
  misc_feature (507)..(507): n is a, c, g, or t
cttcagcgaagtttatttcaaaaccattgaacagtatgatatttgctcatttataaatattcccatttaaataatctgagcttatatattttcagtcttaattaaaggacttgatttaaagagagcacaccagtccaaattgaattgattccatagctattaaaaactaggctcttttacagacactgctacttcttgccccctttgaataaattagaccaatgaataaaacaaacaancaaataaataaataaatagggaagcggttgctcatcanaatgtgggagcgaatgacagagggtttcttanaaccaaatgtggccgtggtttctgtcaggcggctttaagtgataggaaaggtgaaaaaggcctggctcaacaaaagggctggggattggccctgaaagganaaactgactgcctgctgatggacaggaaacctnttaccctcctangcngcnnttgggcttgggggnaacacngganagccnggntttacccgacccnaaag

SEQ ID NO: 506 - DNA, 534 bp, Homo sapiens
  misc_feature (390)..(390): n is a, c, g, or t
  misc_feature (460)..(460): n is a, c, g, or t
  misc_feature (495)..(495): n is a, c, g, or t
  misc_feature (504)..(504): n is a, c, g, or t
  misc_feature (528)..(528): n is a, c, g, or t
cccatcatcaatatttattgagcatttacagtgtactaggcacaatagaacatacagaaaacattgtccctgctcttgaggagcttacattctaaaagaaaaaatacaccttttttaaaatggcatttttgtttggtgttttctgcaaagtactgaggaaatattttgtaaagtgagctttggccttgggcctcaaggaaaagaatctgtacctgtcctgcgtgttgaaagatgataagcccactctacagttggagagtgtagatcccaaaaattacccaaagaagaagatggaaaagcgatttgtcttcaacaagatagaaatcaataacaagctggaatttgagtctgcccagttccccaactggtacatcagcacctctcaagcanaaaacatgcccgtctccctgggagggaccaaaggcggccaggatataactgacttcaccatgcaatttgngtcttctaaagaagagctgacccaaaaagtcctgngctgaatgnggactcaatccctaggctgggcanaaaggg

SEQ ID NO: 507 - DNA, 416 bp, Homo sapiens
cccttagagccaatccttatcccgaagttacggatccggcttgccgacttcccttacctacattgttccaacatgccagaggctgttcaccttggagacctgctgcggatatgggtacggcccggcgcgagatttacaccctctcccccggattttcaagggccagcgagagctcaccggacgccgccggaaccgcgacgctttccaaggcacgggcccctctctcggggcgaacccattccagggcgccctgcccttcacaaagaaaagagaactctccccggggctcccgccggcttctccgggatcggtcgcgttaccgcactggacgcctcgcggcgcccatctccgccactccggattcggggatctgaacccgactccctttcatcggccgagggcaacggaggccatcg

SEQ ID NO: 508 - DNA, 369 bp, Homo sapiens
  misc_feature (222)..(222): n is a, c, g, or t
  misc_feature (359)..(359): n is a, c, g, or t
gcgatggcctccgttgccctcggccgatcgaaagggagtcgggttcagatccccgaatccggagtggcggagatgggcgccgcgaggcgtccagtgcggtaacgcgaccgatcccggagaagccggcgggagccccggggagagttctcttttctttgtgaagggcagggcgccctggaatgggttcgccccgagagaggggcccgtgccttggaaagcgtncgcggttccggcggcgtccggtgagctctcgctggcccttgaaaatccgggggagagggtgtaaatctcgcgccgggccgtacccatatccgcacaggtctcaaggtgaacagccttggcatgttggaacaatgtangtaagggaag

SEQ ID NO: 509 - DNA, 566 bp, Homo sapiens
  misc_feature (507)..(507): n is a, c, g, or t
  misc_feature (538)..(538): n is a, c, g, or t
caaacccactccaccttactaccagacaaccttagccaaaccatttacccaaataaagtataggcgatagaaattgaaacctggcgcaatagatatagtaccgcaagggaaagatgaaaaattatagccaagcataatatagcaaggactaacccctataccttctgcataatgaattaactagaaataactttgcaaggagagccaaagctaagacccccgaaaccagacgagctacctaagaacagctaaaagagcacacccgtctatgtagcaaaatagtgggaagatttataggtagaggcgacaaacctaccgagcctggtgatagctggttgtccaagatagaatcttagttcaactttaaatttgcccacagaaccctctaaatccccttgtaaatttaactgttagtccaaagaggaacagccctttggacactaggaaaaaaccttgtagagagagtaaaaaatttaacacccatagtaggcctaaaagccggaattncagcttgagcgccggtcgttccattaccagncggtctgggggtcaaaaatataataacg

SEQ ID NO: 510 - DNA, 492 bp, Homo sapiens
  misc_feature (400)..(400): n is a, c, g, or t
  misc_feature (467)..(467): n is a, c, g, or t
  misc_feature (482)..(483): n is a, c, g, or t
  misc_feature (487)..(487): n is a, c, g, or t
gcttttaggcctactatgggtgttaaattttttactctctctacaaggttttttcctagtgtccaaagggctgttcctctttggactaacagttaaatttacaaggggatttagagggttctgtgggcaaatttaaagttgaactaagattctatcttggacaaccagctatcaccaggctcggtaggtttgtcgcctctacctataaatcttcccactattttgctacatagacgggtgtgctcttttagctgttcttaggtagctcgtctggtttcgggggtcttagctttggctctccttgcaaagttatttctagttaattcattatgcagaaggtataggggttagtccttgctatattatgcttggctataatttttcatctttcccttgcggnactatatctattgcgccaggtttcaatttctatcgctatactttatttgggtaaatggttggctaanggtgctggtataagnncagngggtt

SEQ ID NO: 511 - DNA, 528 bp, Homo sapiens
  misc_feature (486)..(486): n is a, c, g, or t
  misc_feature (499)..(499): n is a, c, g, or t
ttgaacgctttcttaattggtggctgcttttaggcctactatgggtgttaaattttttactctctctacaaggttttttcctagtgtccaaagagctgttcctctttggactaacagttaaatttacaaggggatttagagggttctgtgggcaaatttaaagttgaactaagattctatcttggacaaccagctatcaccaggctcggtaggtttgtcgcctctacctataaatcttcccactattttgctacatagacggggtgtgctcttttagctgttcttaggtagctcgtctggtttcgggggtcttagctttggctctccttgcaaagttatttctagttaattcattatgcagaaggataggggttaagtccttgctatattatgcttgggtataatttttcatctttcccttgcggtactatatctattgcgccaggtttcaatttctatcgcctatactttatttgggtaaatggnttgctaaaggtgnctggtaataaggtggaatgggtttgcgga

SEQ ID NO: 512 - DNA, 547 bp, Homo sapiens
  misc_feature (3)..(4): n is a, c, g, or t
  misc_feature (11)..(11): n is a, c, g, or t
  misc_feature (14)..(14): n is a, c, g, or t
  misc_feature (24)..(24): n is a, c, g, or t
  misc_feature (35)..(35): n is a, c, g, or t
  misc_feature (56)..(56): n is a, c, g, or t
  misc_feature (98)..(98): n is a, c, g, or t
  misc_feature (530)..(530): n is a, c, g, or t
canncccactncancttactaccngacatccttanccaaaccatttacccaaatanagtataggcgatagaaattgaaacctggcgcaatagatatantaccgcaagggaaagatgaaaaattataaccaagcataatatagcaaggactaacccctataccttctgcataatgaattaactagaaataactttgcaaggagagccaaagctaagacccccgaaaccagacgagctacctaagaacagctaaaagagcacacccgtctatgtagcaaaatagtgggaagatttataggtagaggcgacaaacctaccgagcctggtgatagctggttgtccaagatagaatcttagttcaactttaaatttgcccacagaaccctctaaatccccttgtaaatttaactgttagtccaaagaggaacagctctttggacactaggaaaaaaccttgtagagagagtaaaaaatttaacacccatagtaggcctaaaagcagccccaattaagaaagcgtcaacggaattncagctgagcgccggtcg

SEQ ID NO: 513 - DNA, 718 bp, Homo sapiens
  misc_feature (420)..(420): n is a, c, g, or t
  misc_feature (460)..(460): n is a, c, g, or t
  misc_feature (470)..(470): n is a, c, g, or t
  misc_feature (476)..(476): n is a, c, g, or t
  misc_feature (509)..(509): n is a, c, g, or t
  misc_feature (570)..(570): n is a, c, g, or t
  misc_feature (611)..(611): n is a, c, g, or t
  misc_feature (621)..(621): n is a, c, g, or t
  misc_feature (629)..(629): n is a, c, g, or t
  misc_feature (645)..(645): n is a, c, g, or t
  misc_feature (659)..(659): n is a, c, g, or t
  misc_feature (661)..(661): n is a, c, g, or t
  misc_feature (670)..(670): n is a, c, g, or t
  misc_feature (674)..(674): n is a, c, g, or t
  misc_feature (676)..(676): n is a, c, g, or t
  misc_feature (678)..(678): n is a, c, g, or t
  misc_feature (684)..(684): n is a, c, g, or t
  misc_feature (688)..(688): n is a, c, g, or t
  misc_feature (692)..(692): n is a, c, g, or t
  misc_feature (702)..(702): n is a, c, g, or t
  misc_feature (709)..(709): n is a, c, g, or t
  misc_feature (712)..(712): n is a, c, g, or t
gctggaaatacagcaatgaataggtctctagtctcctggaacatcaaatgatgtttatccaaaagtataaatagttaccattttttattgtcttcttaataaattgaataaaataatgtctttgctgccagtaacatggatggaactggaagtcactattttaagtggaattaaagaaaaagaaagtcaaataccataggttctcacttataagtgggagctaaataatgtatacacatagacgtagagtgtgaaataatagatatcggagactcagagaattgttttgtttgaggaggctgaagataggaccccaatcccttctagcttgtagggtttctgctgagaaatctgtggttaatctaagtttccctttataggttacctggtgcttttgctcacagctcttaagattctttncttcgcttaactttggctaacctggtgacaatatgcctangcgatgatcnttttgngataaatttttcaagtggtctttgtgcctaagnctctagcagacttggggaagttttccttgatatttccccaaatatggttttcaagctttanaatctcttctttctcaggaaccccgatattcttaaggttgnccttgagctnatcccaanttttttgaggtttgtnaaatgggctaaaantnttctttgcntttnangnatgggntcantttnaaaaccttgnttttaanccncgaaat

SEQ ID NO: 514 - DNA, 979 bp, Homo sapiens
  misc_feature (597)..(597): n is a, c, g, or t
  misc_feature (660)..(660): n is a, c, g, or t
  misc_feature (693)..(693): n is a, c, g, or t
  misc_feature (720)..(720): n is a, c, g, or t
  misc_feature (731)..(731): n is a, c, g, or t
  misc_feature (735)..(735): n is a, c, g, or t
  misc_feature (742)..(742): n is a, c, g, or t
  misc_feature (751)..(751): n is a, c, g, or t
  misc_feature (764)..(764): n is a, c, g, or t
  misc_feature (767)..(767): n is a, c, g, or t
  misc_feature (803)..(803): n is a, c, g, or t
  misc_feature (805)..(806): n is a, c, g, or t
  misc_feature (808)..(808): n is a, c, g, or t
  misc_feature (838)..(838): n is a, c, g, or t
  misc_feature (844)..(844): n is a, c, g, or t
  misc_feature (848)..(848): n is a, c, g, or t
  misc_feature (860)..(860): n is a, c, g, or t
  misc_feature (893)..(895): n is a, c, g, or t
  misc_feature (909)..(910): n is a, c, g, or t
  misc_feature (919)..(919): n is a, c, g, or t
  misc_feature (925)..(925): n is a, c, g, or t
  misc_feature (931)..(931): n is a, c, g, or t
  misc_feature (954)..(954): n is a, c, g, or t
  misc_feature (975)..(975): n is a, c, g, or t
ctgtgttagaaaaaatcataaaacataacagaatctacacatcatggtccaccagaggattcacagatggaaatgaattttaatattgttacttttgaagtcccaaatactttaagatttacaataaaaaacattctgacagagtccatgatgaattatttccagtctttcaccagactgcttaagctcacctataaactacgaaatgtataaataaataattacagccaaagcaggtaacaaagtgtctaacctatattccacaggtgcataccatggctacgaataaactatccaatctaaccacagaagctgagcatttggtttggggttaatccacatcacatgactcaccattgagaaagcggctctcaccatgcttaatgggcacagcacctctgcaaacaaatccttccctggctaatcattccctctgagaggtttcctcagtaaagagattagaactacctcttgcatttccaacttttaaaaaattgcctttttggaaatctaccaccaccaactaattcttgacagacttgtagagaatgaccctcaaagaaatatcattcgagacacatattcaagcagactggncatggtggctcatgcctgcagtcccagcagtttgggaagctgaagtgaactgatgcttgaatncaggagtcttgagaacagcctgggtaacatggnaaaaccgggtcctacaaaaaaattccnaaaattacccnggtntgttggngcacaatgngggcccaactttnccnaaagaaaaaagtttggcttcaggaaggcaagggtcncnnanccctgaatggccccttccttcaaccggggnaaaaangggnaacctttttggnaagggaagggaaagggaaagggagggccttttnnntttaaaaaagggannttaaaaggnggcccnaaaacntttttaaagggcaaccttttttncttttttgggaaaattggggnaaat

SEQ ID NO: 515 - DNA, 718 bp, Homo sapiens
  misc_feature (395)..(395): n is a, c, g, or t
  misc_feature (439)..(439): n is a, c, g, or t
  misc_feature (527)..(527): n is a, c, g, or t
  misc_feature (542)..(542): n is a, c, g, or t
  misc_feature (547)..(547): n is a, c, g, or t
  misc_feature (582)..(582): n is a, c, g, or t
  misc_feature (589)..(589): n is a, c, g, or t
  misc_feature (604)..(604): n is a, c, g, or t
  misc_feature (614)..(614): n is a, c, g, or t
  misc_feature (625)..(625): n is a, c, g, or t
  misc_feature (640)..(640): n is a, c, g, or t
  misc_feature (672)..(672): n is a, c, g, or t
  misc_feature (688)..(688): n is a, c, g, or t
  misc_feature (708)..(708): n is a, c, g, or t
aggggatgctctcggtgtctgagctgttgttgacagtggctgggccactgcattcccctctgggcacctcattcccagaggcatgtaaggcttcagcctcctccaccatctcctcctcatttccgctcacgcccgacgcctccatctcctcatcctccaccacgggcgggaatgcagcctcctcgctggccgccgccggcgctttcttcttcttcctccgcgcgttcctctccttctccatcttcagcttgtgctgctgcaagatctcatcgaggttctgcctcttcttgtagttgaagtagaagttcttacactgcgacacagtcttggagcccaccatccgggcgatggccgaccaagttgcggccgtgttccaggagacctttcttggctgnttccatttcttcttctgtccagcgagaactctcattcacttcanggaggccagctcggcgctctgctggggggtgatggcctcctcgttgtggcctcattagcccttgaaccgggtgatgcgggcctttggncttccctggcttgtngcaantttgcggcctttggaggccacagcttccttttggnggttggncctcccctgaggggncgctggcttntccttgagganggcttccttggggtnttcacctcgggttttccctcttttcgggttcnttttccggaatccccnaattgacggttcagaatttngcccaatcca

SEQ ID NO: 516 - DNA, 2943 bp, Homo sapiens; identical to SEQ ID NO: 1

SEQ ID NO: 517 - DNA, 1498 bp, Homo sapiens; identical to SEQ ID NO: 2

SEQ ID NO: 518 - DNA, 8019 bp, Homo sapiens; identical to SEQ ID NO: 3

SEQ ID NO: 519 - DNA, 516 bp, Homo sapiens; identical to SEQ ID NO: 5

SEQ ID NO: 520 - DNA, 1572 bp, Homo sapiens; identical to SEQ ID NO: 6

SEQ ID NO: 521 - DNA, 1199 bp, Homo sapiens; identical to SEQ ID NO: 7

SEQ ID NO: 522 - DNA, 393 bp, Homo sapiens; identical to SEQ ID NO: 8

SEQ ID NO: 523 - DNA, 471 bp, Homo sapiens; identical to SEQ ID NO: 9

SEQ ID NO: 524 - DNA, 2005 bp, Homo sapiens; identical to SEQ ID NO: 10

SEQ ID NO: 525 - DNA, 2237 bp, Homo sapiens; identical to SEQ ID NO: 11

SEQ ID NO: 526 - DNA, 3516 bp, Homo sapiens; identical to SEQ ID NO: 12

SEQ ID NO: 527 - DNA, 1386 bp, Homo sapiens; identical to SEQ ID NO: 13

SEQ ID NO: 528 - DNA, 1386 bp, Homo sapiens; identical to SEQ ID NO: 13

SEQ ID NO: 529 - DNA, 2741 bp, Homo sapiens; identical to SEQ ID NO: 15

SEQ ID NO: 530 - DNA, 2745 bp, Homo sapiens; identical to SEQ ID NO: 16

SEQ ID NO: 531 - DNA, 5054 bp, Homo sapiens; identical to SEQ ID NO: 17

SEQ ID NO: 532 - DNA, 4743 bp, Homo sapiens; identical to SEQ ID NO: 18

SEQ ID NO: 533 - DNA, 1895 bp, Homo sapiens; identical to SEQ ID NO: 19

SEQ ID NO: 534 - DNA, 1041 bp, Homo sapiens; identical to SEQ ID NO: 20

SEQ ID NO: 535 - DNA, 1103 bp, Homo sapiens; identical to SEQ ID NO: 21

SEQ ID NO: 536 - DNA, 2249 bp, Homo sapiens; identical to SEQ ID NO: 22

SEQ ID NO: 537 - DNA, 1547 bp, Homo sapiens; identical to SEQ ID NO: 23

SEQ ID NO: 538 - DNA, 852 bp, Homo sapiens; identical to SEQ ID NO: 24

SEQ ID NO: 539 - DNA, 687 bp, Homo sapiens; identical to SEQ ID NO: 25

SEQ ID NO: 540 - DNA, 850 bp, Homo sapiens; identical to SEQ ID NO: 26

SEQ ID NO: 541 - DNA, 878 bp, Homo sapiens; identical to SEQ ID NO: 27

SEQ ID NO: 542 - DNA, 5041 bp, Homo sapiens; identical to SEQ ID NO: 28

SEQ ID NO: 543 - DNA, 2749 bp, Homo sapiens; identical to SEQ ID NO: 29

SEQ ID NO: 544 - DNA, 767 bp, Homo sapiens; identical to SEQ ID NO: 30

SEQ ID NO: 545 - DNA, 775 bp, Homo sapiens; identical to SEQ ID NO: 31

SEQ ID NO: 546 - DNA, 463 bp, Homo sapiens; identical to SEQ ID NO: 32

SEQ ID NO: 547 - DNA, 2167 bp, Homo sapiens; identical to SEQ ID NO: 33

SEQ ID NO: 548 - DNA, 2104 bp, Homo sapiens; identical to SEQ ID NO: 34

SEQ ID NO: 549 - DNA, 739 bp, Homo sapiens; identical to SEQ ID NO: 35

SEQ ID NO: 550 - DNA, 1351 bp, Homo sapiens; identical to SEQ ID NO: 36

SEQ ID NO: 551 - DNA, 1085 bp, Homo sapiens; identical to SEQ ID NO: 37

SEQ ID NO: 552 - DNA, 1085 bp, Homo sapiens; identical to SEQ ID NO: 37

SEQ ID NO: 553 - DNA, 3310 bp, Homo sapiens; identical to SEQ ID NO: 39

SEQ ID NO: 554 - DNA, 3541 bp, Homo sapiens; identical to SEQ ID NO: 40
  misc_feature (1282)..(1282): n is a, c, g, or t
  misc_feature (1522)..(1522): n is a, c, g, or t
  misc_feature (1840)..(1841): n is a, c, g, or t
  misc_feature (1845)..(1845): n is a, c, g, or t
  misc_feature (1851)..(1851): n is a, c, g, or t
  misc_feature (1855)..(1855): n is a, c, g, or t
  misc_feature (1864)..(1864): n is a, c, g, or t
  misc_feature (1903)..(1903): n is a, c, g, or t
  misc_feature (2109)..(2109): n is a, c, g, or t
  misc_feature (2218)..(2218): n is a, c, g, or t
  misc_feature (2476)..(2476): n is a, c, g, or t
  misc_feature (2488)..(2488): n is a, c, g, or t
  misc_feature (2574)..(2574): n is a, c, g, or t
  misc_feature (2734)..(2734): n is a, c, g, or t
  misc_feature (2753)..(2753): n is a, c, g, or t
  misc_feature (2774)..(2774): n is a, c, g, or t
  misc_feature (3259)..(3259): n is a, c, g, or t
  misc_feature (3381)..(3381): n is a, c, g, or t
  misc_feature (3398)..(3398): n is a, c, g, or t

SEQ ID NO: 555 - DNA, 1722 bp, Homo sapiens; identical to SEQ ID NO: 41

SEQ ID NO: 556 - DNA, 1816 bp, Homo sapiens; identical to SEQ ID NO: 42

SEQ ID NO: 557 - DNA, 2632 bp, Homo sapiens; identical to SEQ ID NO: 43

SEQ ID NO: 558 - DNA, 4832 bp, Homo sapiens; identical to SEQ ID NO: 44

SEQ ID NO: 559 - DNA, 1602 bp, Homo sapiens; identical to SEQ ID NO: 45

SEQ ID NO: 560 - DNA, 5143 bp, Homo sapiens; identical to SEQ ID NO: 46

SEQ ID NO: 561 - DNA, 2306 bp, Homo sapiens; identical to SEQ ID NO: 47

SEQ ID NO: 562 - DNA, 4036 bp, Homo sapiens; identical to SEQ ID NO: 48

SEQ ID NO: 563 - DNA, 4034 bp, Homo sapiens; identical to SEQ ID NO: 49

SEQ ID NO: 564 - DNA, 1451 bp, Homo sapiens; identical to SEQ ID NO: 50

SEQ ID NO: 565 - DNA, 1533 bp, Homo sapiens; identical to SEQ ID NO: 51

SEQ ID NO: 566 - DNA, 3191 bp, Homo sapiens; identical to SEQ ID NO: 52

SEQ ID NO: 567 - DNA, 1933 bp, Homo sapiens; identical to SEQ ID NO: 53

SEQ ID NO: 568 - DNA, 2859 bp, Homo sapiens; identical to SEQ ID NO: 54

SEQ ID NO: 569 - DNA, 2295 bp, Homo sapiens; identical to SEQ ID NO: 55

SEQ ID NO: 570 - DNA, 4863 bp, Homo sapiens; identical to SEQ ID NO: 56

SEQ ID NO: 571 - DNA, 1416 bp, Homo sapiens; identical to SEQ ID NO: 57

SEQ ID NO: 572 - DNA, 2359 bp, Homo sapiens; identical to SEQ ID NO: 58

SEQ ID NO: 573 - DNA, 3037 bp, Homo sapiens; identical to SEQ ID NO: 59

SEQ ID NO: 574 - DNA, 3492 bp, Homo sapiens; identical to SEQ ID NO: 60

SEQ ID NO: 575 - DNA, 3655 bp, Homo sapiens; identical to SEQ ID NO: 61

SEQ ID NO: 576 - DNA, 3655 bp, Homo sapiens; identical to SEQ ID NO: 62

SEQ ID NO: 577 - DNA, 2139 bp, Homo sapiens; identical to SEQ ID NO: 63

SEQ ID NO: 578 - DNA, 1679 bp, Homo sapiens; identical to SEQ ID NO: 64

SEQ ID NO: 579 - DNA, 2291 bp, Homo sapiens; identical to SEQ ID NO: 65

SEQ ID NO: 580 - DNA, 3265 bp, Homo sapiens; identical to SEQ ID NO: 66
  misc_feature (242)..(242): n is a, c, g, or t
  misc_feature (443)..(443): n is a, c, g, or t
  misc_feature (445)..(445): n is a, c, g, or t

SEQ ID NO: 581 - DNA, 640 bp, Homo sapiens; identical to SEQ ID NO: 67

SEQ ID NO: 582 - DNA, 1172 bp, Homo sapiens; identical to SEQ ID NO: 68

SEQ ID NO: 583 - DNA, 2521 bp, Homo sapiens; identical to SEQ ID NO: 69

SEQ ID NO: 584 - DNA, 2393 bp, Homo sapiens; identical to SEQ ID NO: 70

SEQ ID NO: 585 - DNA, 2139 bp, Homo sapiens; identical to SEQ ID NO: 71

SEQ ID NO: 586 - DNA, 1201 bp, Homo sapiens; identical to SEQ ID NO: 72

SEQ ID NO: 587 - DNA, 1161 bp, Homo sapiens; identical to SEQ ID NO: 73

SEQ ID NO: 588 - DNA, 1995 bp, Homo sapiens; identical to SEQ ID NO: 74

SEQ ID NO: 589 - DNA, 1322 bp, Homo sapiens; identical to SEQ ID NO: 75

SEQ ID NO: 590 - DNA, 1673 bp, Homo sapiens; identical to SEQ ID NO: 76

SEQ ID NO: 591 - DNA, 1701 bp, Homo sapiens; identical to SEQ ID NO: 77

SEQ ID NO: 592 - DNA, 4740 bp, Homo sapiens; identical to SEQ ID NO: 78

SEQ ID NO: 593 - DNA, 1414 bp, Homo sapiens; identical to SEQ ID NO: 79

SEQ ID NO: 594 - DNA, 1589 bp, Homo sapiens; identical to SEQ ID NO: 80

SEQ ID NO: 595 - DNA, 2007 bp, Homo sapiens; identical to SEQ ID NO: 81

SEQ ID NO: 596 - DNA, 500 bp, Homo sapiens; identical to SEQ ID NO: 82

SEQ ID NO: 597 - DNA, 817 bp, Homo sapiens
gaaggaggcccagacagtgagggcaggagggagagaagagacgcagaaggagagcgagcgagagagaaagggttctggattggaggggagagcaagggagggaggaaggcggtgagagaggcgggggcctcgggagggtgaaaggagggaggagaagggcggggcacggaggcccgagcgagggacaagactccgactccagctctgacttttttcgcggctctcggcttccactgcagccatgtcactcctcttgctggtggtctcagcccttcacatcctcattcttatactgcttttcgtggccactttggacaagtcctggtggactctccctgggaaagagtccctgaatctctggtacgactgcacgtggaacaacgacaccaaaacatgggcctgcagtaatgtcagcgagaatggctggctgaaggcggtgcaggtcctcatggtgctctccctcattctctgctgtctctccttcatcctgttcatgttccagctctacaccatgcgacgaggaggtctcttctatgccaccggcctctgccagctttgcaccagcgtggcggtgtttactggcgccttgatctatgccattcacgccgaggagatcctggagaagcacccgcgagggggcagcttcggatactgcttcgccctggcctgggtggccttccccctcgccctggtcagcggcatcatctacatccacctacggaagcgggagtgagcgccccgcctcgctcggctgcccccgccccttcccggcccccctcgccgcgcgtcctccaaaaaaataaaactttaacggcgg

SEQ ID NO: 598 - DNA, 2257 bp, Homo sapiens; identical to SEQ ID NO: 83

SEQ ID NO: 599 - DNA, 3984 bp, Homo sapiens; identical to SEQ ID NO: 84

SEQ ID NO: 600 - DNA, 1322 bp, Homo sapiens; identical to SEQ ID NO: 85

SEQ ID NO: 601 - DNA, 2218 bp, Homo sapiens; identical to SEQ ID NO: 86

SEQ ID NO: 602 - DNA, 1517 bp, Homo sapiens; identical to SEQ ID NO: 87

SEQ ID NO: 603 - DNA, 7680 bp, Homo sapiens; identical to SEQ ID NO: 88

SEQ ID NO: 604 - DNA, 3936 bp, Homo sapiens; identical to SEQ ID NO: 89

SEQ ID NO: 605 - DNA, 4004 bp, Homo sapiens; identical to SEQ ID NO: 90

SEQ ID NO: 606 - DNA, 4204 bp, Homo sapiens; identical to SEQ ID NO: 91

SEQ ID NO: 607 - DNA, 1420 bp, Homo sapiens; identical to SEQ ID NO: 92

SEQ ID NO: 608 - DNA, 1270 bp, Homo sapiens; identical to SEQ ID NO: 93

SEQ ID NO: 609 - DNA, 14985 bp, Homo sapiens; identical to SEQ ID NO: 94

SEQ ID NO: 610 - DNA, 4433 bp, Homo sapiens; identical to SEQ ID NO: 95

SEQ ID NO: 611 - DNA, 5177 bp, Homo sapiens; identical to SEQ ID NO: 96

SEQ ID NO: 612 - DNA, 8056 bp, Homo sapiens; identical to SEQ ID NO: 97

SEQ ID NO: 613 - DNA, 8056 bp, Homo sapiens; identical to SEQ ID NO: 97

SEQ ID NO: 614 - DNA, 2220 bp, Homo sapiens; identical to SEQ ID NO: 99

SEQ ID NO: 615 - DNA, 6227 bp, Homo sapiens; identical to SEQ ID NO: 100

SEQ ID NO: 616 - DNA, 6256 bp, Homo sapiens; identical to SEQ ID NO: 101

SEQ ID NO: 617 - DNA, 6458 bp, Homo sapiens; identical to SEQ ID NO: 102

SEQ ID NO: 618 - DNA, 1721 bp, Homo sapiens; identical to SEQ ID NO: 103

SEQ ID NO: 619 - DNA, 3489 bp, Homo sapiens; identical to SEQ ID NO: 104
  misc_feature (2599)..(2599): n is a, c, g, or t
  misc_feature (2815)..(2815): n is a, c, g, or t

SEQ ID NO: 620 - DNA, 1485 bp, Homo sapiens; identical to SEQ ID NO: 105

SEQ ID NO: 621 - DNA, 2088 bp, Homo sapiens; identical to SEQ ID NO: 106

SEQ ID NO: 622 - DNA, 2055 bp, Homo sapiens; identical to SEQ ID NO: 107

SEQ ID NO: 623 - DNA, 444 bp, Homo sapiens; identical to SEQ ID NO: 108
  misc_feature (134)..(134): n is a, c, g, or t
  misc_feature (353)..(353): n is a, c, g, or t
  misc_feature (400)..(400): n is a, c, g, or t

SEQ ID NO: 624 - DNA, 2227 bp, Homo sapiens; identical to SEQ ID NO: 109

SEQ ID NO: 625 - DNA, 3565 bp, Homo sapiens; identical to SEQ ID NO: 110

SEQ ID NO: 626 - DNA, 1541 bp, Homo sapiens; identical to SEQ ID NO: 111

SEQ ID NO: 627 - DNA, 1941 bp, Homo sapiens; identical to SEQ ID NO: 112

SEQ ID NO: 628 - DNA, 2906 bp, Homo sapiens; identical to SEQ ID NO: 113

SEQ ID NO: 629 - DNA, 1707 bp, Homo sapiens; identical to SEQ ID NO: 114

SEQ ID NO: 630 - DNA, 1797 bp, Homo sapiens; identical to SEQ ID NO: 115

SEQ ID NO: 631 - DNA, 1292 bp, Homo sapiens; identical to SEQ ID NO: 116

SEQ ID NO: 632 - DNA, 1601 bp, Homo sapiens; identical to SEQ ID NO: 117

SEQ ID NO: 633 - DNA, 4051 bp, Homo sapiens; identical to SEQ ID NO: 118

SEQ ID NO: 634 - DNA, 1443 bp, Homo sapiens; identical to SEQ ID NO: 119

SEQ ID NO: 635 - DNA, 309 bp, Homo sapiens; identical to SEQ ID NO: 120

SEQ ID NO: 636 - DNA, 1213 bp, Homo sapiens; identical to SEQ ID NO: 121

SEQ ID NO: 637 - DNA, 540 bp, Homo sapiens; identical to SEQ ID NO: 122

SEQ ID NO: 638 - DNA, 2384 bp, Homo sapiens; identical to SEQ ID NO: 123

SEQ ID NO: 639 - DNA, 4426 bp, Homo sapiens; identical to SEQ ID NO: 124

SEQ ID NO: 640 - DNA, 8201 bp, Homo sapiens
ctaaaaataccattaagtaatagtattagcttttgtattctgagattcaacagcagcagtcacttccctccactcctatgtgtatcccaggaccaccctgggcggggagggctgaggtcagggaggtctgaagctggtcctgggctccgggggtgacagtgatgaggaactgggtgcacacatgagtggggcagccgggcctggccagagaagcaacacacacgtgcacagacatgtttatccacatacacatgtgcacgcatgtgcacaaacacattgcaggcaggcatgttgacgcctcaggcagcggaggaccctgactctgggccctgctgacccgggcaaggcccattgtgatgcgtgccatgacctcagaatgtcactggtgcttagcacctatccgctctccagactgcgtctgtgttctacggcagttacacacacgcagtggtattcacaagcggttttgtggactcaaaggttttctccctgagaggcataacccaggccagctgattcatcagaatcaggtgagtgtgacctgctctcttccctccaggctgacttggggacagtggctatggtatgggcggtgttggcctctgggcagctacagaggagggtcatccctgagcactcaccgggcgcccgttctacactgcccatgtagacgattttctctttcgtcttcatggtggcttcgtagagtgggtgctgttcccaaatgtacccattcgacaggtgagccgtctggggtcagagaggcagtaactggcctgggaatccagacaagaccctgggttttgctctcagccctgctgtgtgccatgctagacttcaggcctcaaccctgagacctccctgctctagatcccaaatctgcccagatttccgatccaatgggcagagcctggccctggcagagacactgggatggatccactgtgggtggggaggagggaagggtcctcagaacacacctggggcctaagctgggtcttgatggtcactgtgggacccactggacacacacagtcccttgtctgggagtggcatggggagccttctgcccttgggcagttgtggaaagtgaaggagccctggagagctggctgaggggagactatcttcccttgtgttcaaaggggtccaggcactggggctctccccaagtatttcttattctgtctggcctcgctttccttttgccctgagtattctcaggagggacggtccatctagatgtcctccaggagcaaggacccactgttcttcatcagtgacccaggaaaatgaagccccctcctgtggggacagctcagaatggtggagtccacagtccctccctgagagacatggtttccatgagcacagtggctgctttggagacagtaatcattttcatccccaaaaccaaacacactcctgctcaaatggtgttattgctaaagcagcttcactggttagactgaagggccatggtagcccaagtgatgagcggggtagaatggagcagtcaggagagatcttgttccccgtaggaaactgggcatctctgtggccctgaacatcccaggaggccgatcgtacagagacctctggtgcctgaccgcagttcacatccacatccctggaatagaccatcacaggctcttcacccttggcaggtggacaccattcaacctgccggggcaggatggacatggtagagaatgcagatagtttgcaggcacaggagcggaaggacatacttatgaagtatgacaagggacaccgagctgggctgccagaggacaaggggcctgagcccgttggaatcaacagcagcattgatcgttttggcattttgcatgagacggagctgcctcctgtgactgcacgggaggcgaagaaaattcggcgggagatgacacgaacgagcaagtggatggaaatgctgggagaatgggagacatataagcacagtagcaaactcatagatcgagtgtacaagggaattcccatgaacatccggggcccggtgtggtcagtcctcctgaacattcaggaaatcaagttgaaaaaccccggaagataccagatcatgaaggagaggggcaagaggtcatctgaacacatccaccacatcgacctggacgtgaggacgactctccggaaccatgtcttctttagggatcgatatggagccaagcagagggaactattctacatcctcctggcctattcggagtataacccggaggtgggctactgcagggacctgagccacatcaccgccttgttcctcctttatctgcctgaggaggacgcattctgggcactggtgcagctgctggccagtgagaggcactccctgccaggattccacagcccaaatggtgggacagtccaggggctccaagaccaacaggagcatgtggtacccaagtcacaacccaagaccatgtggcatcaggacaaggaaggtctatgcgggcagtgtgcctcgttaggctgccttctccggaacctgattgacgggatctctctcgggctcaccctgcgcctgtgggacgtgtatttggtggaaggagaacaggtgttgatgccaataaccagcattgctcttaaggttcagcagaagcgcctcatgaagacatccaggtgtggcctgtgggcacgtctgcggaaccaattcttcgatacctgggccatgaacgatgacaccgtgctcaagcatcttagggcctctacgaagaaactaacaaggaagcaaggggacctgccacccccaggcccaacagccctgggacgaaggtgtgtggcaggaagcccccagccagtctgaaccctgggggcagtcccaggagccacccaccatgccccaacggcttccccatgccaggcagcacacacccctccctctgggatcagcagactacaggcgtgtcgtcagtgtcagaccacaggggccacacagagaccccaaggactccagagatgcagccaaacgcgagcaagggtccttggcacccaggcctgtgccggcttcacgtggtgggaagaccctctgcaaggggtataggcaggcccctccaggcccaccagcccagttccagcggcccatttgctcagcttccccgccatgggcatctcgtttttccacgccctgtcctggtggggctgtccgggaagacacgtaccctgtgggcactcagggtgtgcccagcctggccctggctcagggaggacctcagggttcctggagattcctggagtggaagtcaatgccccggctcccaacggacctggatatagggggcccttggttcccccattatgattttgaacggagctgctgggtccgtgccatatcccaggaggaccagctggccacctgctggcaggctgaacactgcggagaggttcacaacaaagatatgagttggcctgaggagatgtcttttacagcaaatagtagtaaaatagatagacaaaaggttcccacagaaaagggagccacaggtctaagcaacctgggaaacacatgcttcatgaactcaagcatccagtgcgttagtaacacacagccactgacacagtattttatctcagggagacatctttatgaactcaacaggacaaatcccattggtatgaaggggcatatggctaaatgctatggtgatttagtgcaggaactctggagtggaactcagaagagtgttgccccattaaagcttcggcggaccatagcaaaatatgctcccaagtttgatgggtttcagcaacaagactcccaagaacttctggcttttctcttggatggtcttcatgaagatctcaaccgagtccatgaaaagccatatgtggaactgaaggacagtgatggccgaccagactgggaagtagctgcagaggcctgggacaaccatctaagaagaaatagatcaattattgtggatttgttccatgggcagctaagatctcaagtcaaatgcaagacatgtgggcatataagtgtccgatttgaccctttcaattttttgtctttgccactaccaatggacagttacatggacttagaaataacagtgattaagttagatggtactacccctgtacggtatggactaagactgaatatggatgaaaagtacacaggtttaaaaaaacagctgagggatctctgtggacttaattcagaacaaatcctactagcagaagtacatgattccaacataaagaactttcctcaggataaccaaaaagtacaactctcagtgagcggatttttgtgtgcatttgaaattcctgtcccttcatctccaatttcagcttctagtccaacacaaatagatttctcctcttcaccatctacaaatggaatgttcaccctaactaccaatggggacctacccaaaccaatattcatccccaatggaatgccaaacactgttgtgccatgtggaactgagaagaacttcacaaatggaatggttaatggtcacatgccatctcttcctgacagcccctttacaggttacatcattgcagtccaccgaaaaatgatgaggacagaactgtatttcctgtcacctcaggagaatcgccccagcctctttggaatgccattgattgttccatgcactgtgcatacccagaagaaagacctatatgatgcggtttggattcaagtatcctggttagcaagaccactcccacctcaggaagctagtattcatgcccaggatcgtgataactgtatgggctatcaatatccattcactctacgagttgtgcagaaagatgggatctcctgtgcttggtgcccacagtatagattttgcagaggctgtaaaattgattgtggggaagacagagctttcattggaaatgcctatattgctgtggattggcaccccacagcccttcaccttcgctatcaaacatcccaggaaagggttgtagataagcatgagagtgtggagcagagtcggcgagcgcaagccgagcccatcaacctggacagctgtctccgtgctttcaccagtgaggaagagctaggggaaagtgagatgtactactgttccaagtgtaagacccactgcttagcaacaaagaagctggatctctggaggcttccacccttcctgattattcaccttaagcgatttcaatttgtaaatgatcagtggataaaatcacagaaaattgtcagatttcttcgggaaagttttgatccgagtgcttttttggtaccacgagacccggccctctgccagcataaaccactcacaccccagggggatgagctctccaagcccaggattctggcaagagaggtgaagaaagtggatgcgcagagttcggctggaaaagaggacatgctcctaagcaaaagcccatcttcactcagcgctaacatcagcagcagcccaaaaggttctccttcttcatcaagaaaaagtggaaccagctgtccctccagcaaaaacagcagccctaatagcagcccacggactttggggaggagcaaagggaggctccggctgccccagattggcagcaaaaataagccgtcaagtagtaagaagaacttggatgccagcaaagagaatggggctgggcagatctgtgagctggctgacgccttgagccgagggcatatgcgggggggcagccaaccagagctggtcactcctcaggaccatgaggtagctttggccaatggattcctttatgagcatgaagcatgtggcaatggctgtggcgatggctacagcaatggtcagcttggaaaccacagtgaagaagacagcactgatgaccaaagagaagacactcatattaagcctatttataatctatatgcaatttcatgccattcaggaattctgagtgggggccattacatcacttatgccaaaaacccaaactgcaagtggtactgttataatgacagcagctgtgaggaacttcaccctgatgaaattgacaccgactctgcctacattcttttctatgagcagcaggggatagactacgcacaatttctgccaaagattgatggcaaaaagatggcagacacaagcagtacggatgaagactctgagtctgattacgaaaagtactctatgttacagtaaagctaccactctggctgctagacagcttggtggcgagggagatgactccttgtagctgatacttggcaaaagtgtcactgaaagacaagctaaatgtagttattttatcctgttagaacaaaaattctaattaaaatagttaacttgaagagtagaaacaattgtattttgaagtctcatacaagctgtctgatagagaactttcaggcagatcccaccattagcctgtaaacaaaaggtgtggcaccagccacctgggaccaaataagaattgaattgtgcttgtccagatatgaacaaatatgtagtgagtatagagtttaccaataatcataacaaatattaaagatttccttggagtcagaggaaaaaacaaacaattataatgttgtctagggacgacatgatacgctacctcctttttcctgaagttttattccattatattgacaagatggagaaagcaagatcatgaaggtgtgcaaatgattcttacggcatggacaaggatttttcaatttattttttaaactgtttccataccctttctttttcttgctttttgtttttgccattgtgtttacgtttgagacacaaccagtcattggtggcaggggcatagagtggtcagtctgaaagggaggctctcttaagagctatgtgccttccaaccagagggagacccagtagaaagaaaaacatcctgggaaatccagctaccagggccctcccagtggaggcatcttacatttaggctacttcaagtatcctcagaaatgtattctgcacccccggccccgcccatgctgagggaaggggagcagttgccaatatttgcaccatcttcacatgcacatgttgcaacaagagcttctgggaaggtaagcggcatcggagctagatcacgtttcacaattagtggttattcttttctgtgtttgttttgcactttaaaaaagagagaacacatgcaaatgaacttgcttgtgtgtatttgatggctctaagggctataaattacaaacaaaacacatcccagacattaggagttcataagtatatttaatgaaattggtggttttaggaagtcaactttagttttgctttgtttgcatgtccactggtttttttattttgatatttgtctttttttaaattttacagtagtcattgaaagttatgtttctttgcttacttcattttttccctctaattatttaagattggaacaaaagtataaatattatttatttgaggtagaatttttttcatgtagtttcttaatatatacttgaaggaaatgtttcaccttatttttggtctttgtttattcatttagaccctgcaagttgattctcattgccagattccattaccctttcttcctcataggtagtaattaccaatgtaactaagcatttgtgttctgatatctgaggccagtaactattaatatctagttctcagagcatttggaaaggttatcttaaatggctacctaaattgaaatccttttcagaaaaaatataattgcaagtaggtaggagtggcctaaattgtctaatgtaataaagtcagacaaaatgcacactttatagtttcaagattttcagtaaataaaatctgtccattcctacctggacatgtcccattaaaaagtggaagattttaaataatttctttacagatgttttatttaaacaggtagcacaatctactaatgttgtgtgatttgtgttatactggttgtaattaatttttttaattcatgaactagcggaaaatttattaaattaactattaactacattcaccttgtaaattactgtataaaacttgttgacaatgcactgactttagaaagatgttaatgtacataaatagagtgtaaataaaatagtgttgatgtactgaaatatgaactgtatcaaaagtattggtaattgtatatggggtgtacctgtttatctgttaactattatccaaacaaattaaatactgtggttgcctctatgtgctgtttttcctcatacaagtaaacacagaaagtcaaaaaaaaaaaaaaaaaaaaaa

SEQ ID NO: 641 - DNA, 2021 bp, Homo sapiens; identical to SEQ ID NO: 125

SEQ ID NO: 642 - DNA, 954 bp, Homo sapiens; identical to SEQ ID NO: 126

SEQ ID NO: 643 - DNA, 1007 bp, Homo sapiens; identical to SEQ ID NO: 127

SEQ ID NO: 644 - DNA, 790 bp, Homo sapiens; identical to SEQ ID NO: 128

SEQ ID NO: 645 - DNA, 878 bp, Homo sapiens; identical to SEQ ID NO: 129

SEQ ID NO: 646 - DNA, 2791 bp, Homo sapiens; identical to SEQ ID NO: 130

SEQ ID NO: 647 - DNA, 2791 bp, Homo sapiens; identical to SEQ ID NO: 130

SEQ ID NO: 648 - DNA, 3467 bp, Homo sapiens; identical to SEQ ID NO: 132

SEQ ID NO: 649 - DNA, 2435 bp, Homo sapiens; identical to SEQ ID NO: 133

SEQ ID NO: 650 - DNA, 5093 bp, Homo sapiens; identical to SEQ ID NO: 134

SEQ ID NO: 651 - DNA, 2380 bp, Homo sapiens; identical to SEQ ID NO: 135

SEQ ID NO: 652 - DNA, 3387 bp, Homo sapiens; identical to SEQ ID NO: 136

SEQ ID NO: 653 - DNA, 1334 bp, Homo sapiens; identical to SEQ ID NO: 137

SEQ ID NO: 654 - DNA, 1296 bp, Homo sapiens; identical to SEQ ID NO: 138

SEQ ID NO: 655 - DNA, 1651 bp, Homo sapiens; identical to SEQ ID NO: 139

SEQ ID NO: 656 - DNA, 1676 bp, Homo sapiens; identical to SEQ ID NO: 140

SEQ ID NO: 657 - DNA, 4205 bp, Homo sapiens; identical to SEQ ID NO: 141
  misc_feature (4097)..(4097): n is a, c, g, or t

SEQ ID NO: 658 - DNA, 2995 bp, Homo sapiens; identical to SEQ ID NO: 142

SEQ ID NO: 659 - DNA, 1633 bp, Homo sapiens; identical to SEQ ID NO: 143

SEQ ID NO: 660 - DNA, 1625 bp, Homo sapiens; identical to SEQ ID NO: 144

SEQ ID NO: 661 - DNA, 1413 bp, Homo sapiens; identical to SEQ ID NO: 145

SEQ ID NO: 662 - DNA, 1486 bp, Homo sapiens; identical to SEQ ID NO: 146

SEQ ID NO: 663 - DNA, 1332 bp, Homo sapiens; identical to SEQ ID NO: 147

SEQ ID NO: 664 - DNA, 2684 bp, Homo sapiens; identical to SEQ ID NO: 148

SEQ ID NO: 665 - DNA, 2657 bp, Homo sapiens; identical to SEQ ID NO: 149

SEQ ID NO: 666 - DNA, 1498 bp, Homo sapiens; identical to SEQ ID NO: 150

SEQ ID NO: 667 - DNA, 1319 bp, Homo sapiens; identical to SEQ ID NO: 151

SEQ ID NO: 668 - DNA, 556 bp, Homo sapiens; identical to SEQ ID NO: 152

SEQ ID NO: 669 - DNA, 332 bp, Homo sapiens; identical to SEQ ID NO: 153

SEQ ID NO: 670 - DNA, 12857 bp, Homo sapiens; identical to SEQ ID NO: 154

SEQ ID NO: 671 - DNA, 560 bp, Homo sapiens; identical to SEQ ID NO: 155

SEQ ID NO: 672 - DNA, 1026 bp, Homo sapiens; identical to SEQ ID NO: 156

SEQ ID NO: 673 - DNA, 1984 bp, Homo sapiens; identical to SEQ ID NO: 157

SEQ ID NO: 674 - DNA, 780 bp, Homo sapiens; identical to SEQ ID NO: 158

SEQ ID NO: 675 - DNA, 1949 bp, Homo sapiens; identical to SEQ ID NO: 159

SEQ ID NO: 676 - DNA, 1951 bp, Homo sapiens; identical to SEQ ID NO: 160
  misc_feature (379)..(584): n is a, c, g, or t

SEQ ID NO: 677 - DNA, 8460 bp, Homo sapiens; identical to SEQ ID NO: 161
  misc_feature (8148)..(8148): n is a, c, g, or t

SEQ ID NO: 678 - DNA, 1100 bp, Homo sapiens; identical to SEQ ID NO: 162

SEQ ID NO: 679 - DNA, 1856 bp, Homo sapiens; identical to SEQ ID NO: 163

SEQ ID NO: 680 - DNA, 2587 bp, Homo sapiens; identical to SEQ ID NO: 164
  misc_feature (2318)..(2318): n is a, c, g, or t

SEQ ID NO: 681 - DNA, 3345 bp, Homo sapiens; identical to SEQ ID NO: 165

SEQ ID NO: 682 - DNA, 2731 bp, Homo sapiens; identical to SEQ ID NO: 166

SEQ ID NO: 683 - DNA, 3257 bp, Homo sapiens; identical to SEQ ID NO: 167

SEQ ID NO: 684 - DNA, 1371 bp, Homo sapiens; identical to SEQ ID NO: 168

SEQ ID NO: 685 - DNA, 2377 bp, Homo sapiens; identical to SEQ ID NO: 169

SEQ ID NO: 686 - DNA, 2771 bp, Homo sapiens; identical to SEQ ID NO: 170
  misc_feature (2658)..(2658): n is a, c, g, or t
  misc_feature (2660)..(2660): n is a, c, g, or t
  misc_feature (2753)..(2753): n is a, c, g, or t

SEQ ID NO: 687 - DNA, 1922 bp, Homo sapiens; identical to SEQ ID NO: 171

SEQ ID NO: 688 - DNA, 3131 bp, Homo sapiens; identical to SEQ ID NO: 172

SEQ ID NO: 689 - DNA, 435 bp, Homo sapiens; identical to SEQ ID NO: 173
  misc_feature (148)..(148): n is a, c, g, or t
  misc_feature (246)..(246): n is a, c, g, or t
  misc_feature (348)..(348): n is a, c, g, or t
  misc_feature (374)..(374): n is a, c, g, or t

SEQ ID NO: 690 - DNA, 1059 bp, Homo sapiens; identical to SEQ ID NO: 174

SEQ ID NO: 691 - DNA, 1144 bp, Homo sapiens; identical to SEQ ID NO: 175

SEQ ID NO: 692 - DNA, 2004 bp, Homo sapiens; identical to SEQ ID NO: 176

SEQ ID NO: 693 - DNA, 2245 bp, Homo sapiens; identical to SEQ ID NO: 177

SEQ ID NO: 694 - DNA, 2917 bp, Homo sapiens; identical to SEQ ID NO: 178
  misc_feature (560)..(593): n is a, c, g, or t

SEQ ID NO: 695 - DNA, 2955 bp, Homo sapiens; identical to SEQ ID NO: 179

SEQ ID NO: 696 - DNA, 1635 bp, Homo sapiens; identical to SEQ ID NO: 180

SEQ ID NO: 697 - DNA, 2163 bp, Homo sapiens; identical to SEQ ID NO: 181

SEQ ID NO: 698 - DNA, 641 bp, Homo sapiens; identical to SEQ ID NO: 182

SEQ ID NO: 699 - DNA, 2268 bp, Homo sapiens; identical to SEQ ID NO: 183

SEQ ID NO: 700 - DNA, 5296 bp, Homo sapiens; identical to SEQ ID NO: 184

SEQ ID NO: 701 - DNA, 2187 bp, Homo sapiens; identical to SEQ ID NO: 185

SEQ ID NO: 702 - DNA, 1218 bp, Homo sapiens; identical to SEQ ID NO: 186

SEQ ID NO: 703 - DNA, 2681 bp, Homo sapiens; identical to SEQ ID NO: 187

SEQ ID NO: 704 - DNA, 5792 bp, Homo sapiens; identical to SEQ ID NO: 188

SEQ ID NO: 705 - DNA, 2063 bp, Homo sapiens; identical to SEQ ID NO: 189

SEQ ID NO: 706 - DNA, 4125 bp, Homo sapiens; identical to SEQ ID NO: 190

SEQ ID NO: 707 - DNA, 4176 bp, Homo sapiens; identical to SEQ ID NO: 191

SEQ ID NO: 708 - DNA, 3131 bp, Homo sapiens; identical to SEQ ID NO: 192

SEQ ID NO: 709 - DNA, 3131 bp, Homo sapiens; identical to SEQ ID NO: 192

SEQ ID NO: 710 - DNA, 2071 bp, Homo sapiens; identical to SEQ ID NO: 194

SEQ ID NO: 711 - DNA, 1399 bp, Homo sapiens; identical to SEQ ID NO: 195

SEQ ID NO: 712 - DNA, 2063 bp, Homo sapiens; identical to SEQ ID NO: 189

SEQ ID NO: 713 - DNA, 4125 bp, Homo sapiens; identical to SEQ ID NO: 190

SEQ ID NO: 714 - DNA, 1702 bp, Homo sapiens; identical to SEQ ID NO: 198

SEQ ID NO: 715 - DNA, 1452 bp, Homo sapiens; identical to SEQ ID NO: 199

SEQ ID NO: 716 - DNA, 2385 bp, Homo sapiens; identical to SEQ ID NO: 200

SEQ ID NO: 717 - DNA, 1751 bp, Homo sapiens; identical to SEQ ID NO: 201

SEQ ID NO: 718 - DNA, 2003 bp, Homo sapiens; identical to SEQ ID NO: 202

SEQ ID NO: 719 - DNA, 857 bp, Homo sapiens; identical to SEQ ID NO: 203

SEQ ID NO: 720 - DNA, 1702 bp, Homo sapiens; identical to SEQ ID NO: 204

SEQ ID NO: 721 - DNA, 1632 bp, Homo sapiens; identical to SEQ ID NO: 205

SEQ ID NO: 722 - DNA, 1255 bp, Homo sapiens; identical to SEQ ID NO: 206

SEQ ID NO: 723 - DNA, 1973 bp, Homo sapiens; identical to SEQ ID NO: 207

SEQ ID NO: 724 - DNA, 2187 bp, Homo sapiens; identical to SEQ ID NO: 209

SEQ ID NO: 725 - DNA, 782 bp, Homo sapiens; identical to SEQ ID NO: 210

SEQ ID NO: 726 - DNA, 1075 bp, Homo sapiens; identical to SEQ ID NO: 211

SEQ ID NO: 727 - DNA, 5487 bp, Homo sapiens; identical to SEQ ID NO: 212

SEQ ID NO: 728 - DNA, 1189 bp, Homo sapiens; identical to SEQ ID NO: 213

SEQ ID NO: 729 - DNA, 934 bp, Homo sapiens; identical to SEQ ID NO: 214

SEQ ID NO: 730 - DNA, 1456 bp, Homo sapiens; identical to SEQ ID NO: 215

SEQ ID NO: 731 - DNA, 1343 bp, Homo sapiens; identical to SEQ ID NO: 216

SEQ ID NO: 732 - DNA, 998 bp, Homo sapiens; identical to SEQ ID NO: 217

SEQ ID NO: 733 - DNA, 1355 bp, Homo sapiens; identical to SEQ ID NO: 218

SEQ ID NO: 734 - DNA, 1121 bp, Homo sapiens; identical to SEQ ID NO: 219

SEQ ID NO: 735 - DNA, 1378 bp, Homo sapiens; identical to SEQ ID NO: 220

SEQ ID NO: 736 - DNA, 1078 bp, Homo sapiens; identical to SEQ ID NO: 221

SEQ ID NO: 737 - DNA, 3775 bp, Homo sapiens; identical to SEQ ID NO: 222

SEQ ID NO: 738 - DNA, 4157 bp, Homo sapiens; identical to SEQ ID NO: 223

SEQ ID NO: 739 - DNA, 2588 bp, Homo sapiens; identical to SEQ ID NO: 224

SEQ ID NO: 740 - DNA, 2271 bp, Homo sapiens; identical to SEQ ID NO: 225

SEQ ID NO: 741 - DNA, 2402 bp, Homo sapiens; identical to SEQ ID NO: 226

SEQ ID NO: 742 - DNA, 2052 bp, Homo sapiens; identical to SEQ ID NO: 227

SEQ ID NO: 743 - DNA, 5316 bp, Homo sapiens; identical to SEQ ID NO: 229

SEQ ID NO: 744 - DNA, 3433 bp, Homo sapiens; identical to SEQ ID NO: 230

SEQ ID NO: 745 - DNA, 3625 bp, Homo sapiens; identical to SEQ ID NO: 231

SEQ ID NO: 746 - DNA, 612 bp, Homo sapiens; identical to SEQ ID NO: 232

SEQ ID NO: 747 - DNA, 657 bp, Homo sapiens; identical to SEQ ID NO: 233

SEQ ID NO: 748 - DNA, 1448 bp, Homo sapiens; identical to SEQ ID NO: 234

SEQ ID NO: 749 - DNA, 2353 bp, Homo sapiens; identical to SEQ ID NO: 235

SEQ ID NO: 750 - DNA, 2087 bp, Homo sapiens; identical to SEQ ID NO: 236

SEQ ID NO: 751 - DNA, 2639 bp, Homo sapiens; identical to SEQ ID NO: 237

SEQ ID NO: 752 - DNA, 2079 bp, Homo sapiens; identical to SEQ ID NO: 238

SEQ ID NO: 753 - DNA, 3101 bp, Homo sapiens; identical to SEQ ID NO: 239

SEQ ID NO: 754 - DNA, 1837 bp, Homo sapiens; identical to SEQ ID NO: 240

SEQ ID NO: 755 - DNA, 1837 bp, Homo sapiens; identical to SEQ ID NO: 240

SEQ ID NO: 756 - DNA, 1720 bp, Homo sapiens; identical to SEQ ID NO: 242

SEQ ID NO: 757 - DNA, 1747 bp, Homo sapiens; identical to SEQ ID NO: 243

SEQ ID NO: 758 - DNA, 3148 bp, Homo sapiens; identical to SEQ ID NO: 244

SEQ ID NO: 759 - DNA, 6007 bp, Homo sapiens; identical to SEQ ID NO: 245

SEQ ID NO: 760 - DNA, 201239 bp, Homo sapiens; identical to SEQ ID NO: 246

SEQ ID NO: 761 - DNA, 2054 bp, Homo sapiens; identical to SEQ ID NO: 247

SEQ ID NO: 762 - DNA, 2046 bp, Homo sapiens; identical to SEQ ID NO: 248

SEQ ID NO: 763 - DNA, 1746 bp, Homo sapiens; identical to SEQ ID NO: 249

SEQ ID NO: 764 - DNA, 472 bp, Homo sapiens; identical to SEQ ID NO: 250

SEQ ID NO: 765 - DNA, 1796 bp, Homo sapiens; identical to SEQ ID NO: 251

SEQ ID NO: 766 - DNA, 5027 bp, Homo sapiens; identical to SEQ ID NO: 252

SEQ ID NO: 767 - DNA, 3314 bp, Homo sapiens; identical to SEQ ID NO: 253

SEQ ID NO: 768 - DNA, 413 bp, Homo sapiens; identical to SEQ ID NO: 254
  misc_feature (20)..(20): n is a, c, g, or t
  misc_feature (174)..(174): n is a, c, g, or t
  misc_feature (179)..(179): n is a, c, g, or t
  misc_feature (244)..(244): n is a, c, g, or t
  misc_feature (285)..(285): n is a, c, g, or t
  misc_feature (299)..(299): n is a, c, g, or t
  misc_feature (323)..(323): n is a, c, g, or t
  misc_feature (341)..(341): n is a, c, g, or t
  misc_feature (355)..(355): n is a, c, g, or t
  misc_feature (367)..(367): n is a, c, g, or t
  misc_feature (388)..(388): n is a, c, g, or t

SEQ ID NO: 769 - DNA, 115218 bp, Homo sapiens; identical to SEQ ID NO: 255

SEQ ID NO: 770 - DNA, 1322 bp, Homo sapiens; identical to SEQ ID NO: 256

SEQ ID NO: 771 - DNA, 508 bp, Homo sapiens; identical to SEQ ID NO: 257

SEQ ID NO: 772 - DNA, 2530 bp, Homo sapiens; identical to SEQ ID NO: 258

SEQ ID NO: 773 - DNA, 374 bp, Homo sapiens; identical to SEQ ID NO: 259

SEQ ID NO: 774 - DNA, 1236 bp, Homo sapiens; identical to SEQ ID NO: 260

SEQ ID NO: 775 - DNA, 1407 bp, Homo sapiens; identical to SEQ ID NO: 261

SEQ ID NO: 776 - DNA, 2573 bp, Homo sapiens; identical to SEQ ID NO: 262

SEQ ID NO: 777 - DNA, 466 bp, Homo sapiens; identical to SEQ ID NO: 263

SEQ ID NO: 778 - DNA, 466 bp, Homo sapiens; identical to SEQ ID NO: 263

SEQ ID NO: 779 - DNA, 744 bp, Homo sapiens; identical to SEQ ID NO: 265

SEQ ID NO: 780 - DNA, 614 bp, Homo sapiens; identical to SEQ ID NO: 266

SEQ ID NO: 781 - DNA, 614 bp, Homo sapiens; identical to SEQ ID NO: 266

SEQ ID NO: 782 - DNA, 2565 bp, Homo sapiens; identical to SEQ ID NO: 268

SEQ ID NO: 783 - DNA, 4583 bp, Homo sapiens; identical to SEQ ID NO: 269

SEQ ID NO: 784 - DNA, 1204 bp, Homo sapiens; identical to SEQ ID NO: 270

SEQ ID NO: 785 - DNA, 1319 bp, Homo sapiens; identical to SEQ ID NO: 151

SEQ ID NO: 786 - DNA, 2541 bp, Homo sapiens; identical to SEQ ID NO: 272

SEQ ID NO: 787 - DNA, 159 bp, Homo sapiens; identical to SEQ ID NO: 273

SEQ ID NO: 788 - DNA, 1411 bp, Homo sapiens; identical to SEQ ID NO: 274

SEQ ID NO: 789 - DNA, 1642 bp, Homo sapiens; identical to SEQ ID NO: 275

SEQ ID NO: 790 - DNA, 2947 bp, Homo sapiens; identical to SEQ ID NO: 276

SEQ ID NO: 791 - DNA, 20575 bp, Homo sapiens; identical to SEQ ID NO: 277

SEQ ID NO: 792 - DNA, 2780 bp, Homo sapiens; identical to SEQ ID NO: 278

SEQ ID NO: 793 - DNA, 2780 bp, Homo sapiens; identical to SEQ ID NO: 278

SEQ ID NO: 794 - DNA, 1440 bp, Homo sapiens; identical to SEQ ID NO: 280

SEQ ID NO: 795 - DNA, 363 bp, Homo sapiens; identical to SEQ ID NO: 281

SEQ ID NO: 796 - DNA, 1524 bp, Homo sapiens; identical to SEQ ID NO: 282

SEQ ID NO: 797 - DNA, 1684 bp, Homo sapiens; identical to SEQ ID NO: 283

SEQ ID NO: 798 - DNA, 1278 bp, Homo sapiens; identical to SEQ ID NO: 284

SEQ ID NO: 799 - DNA, 776 bp, Homo sapiens; identical to SEQ ID NO: 285

SEQ ID NO: 800 - DNA, 5670 bp, Homo sapiens; identical to SEQ ID NO: 286

SEQ ID NO: 801 - DNA, 1741 bp, Homo sapiens; identical to SEQ ID NO: 287

SEQ ID NO: 802 - DNA, 1635 bp, Homo sapiens; identical to SEQ ID NO: 288

SEQ ID NO: 803 - DNA, 853 bp, Homo sapiens; identical to SEQ ID NO: 289
  misc_feature (597)..(597): n is a, c, g, or t
  misc_feature (602)..(602): n is a, c, g, or t
  misc_feature (660)..(660): n is a, c, g, or t

SEQ ID NO: 804 - DNA, 2492 bp, Homo sapiens; identical to SEQ ID NO: 290

SEQ ID NO: 805 - DNA, 778 bp, Homo sapiens; identical to SEQ ID NO: 291

SEQ ID NO: 806 - DNA, 822 bp, Homo sapiens; identical to SEQ ID NO: 292

SEQ ID NO: 807 - DNA, 4416 bp, Homo sapiens; identical to SEQ ID NO: 293

SEQ ID NO: 808 - DNA, 2800 bp, Homo sapiens; identical to SEQ ID NO: 294

SEQ ID NO: 809 - DNA, 1024 bp, Homo sapiens; identical to SEQ ID NO: 295

SEQ ID NO: 810 - DNA, 1002 bp, Homo sapiens; identical to SEQ ID NO: 296

SEQ ID NO: 811 - DNA, 3759 bp, Homo sapiens; identical to SEQ ID NO: 297

SEQ ID NO: 812 - DNA, 8702 bp, Homo sapiens; identical to SEQ ID NO: 298

SEQ ID NO: 813 - DNA, 1240 bp, Homo sapiens; identical to SEQ ID NO: 299

SEQ ID NO: 814 - DNA, 1119 bp, Homo sapiens; identical to SEQ ID NO: 300

SEQ ID NO: 815 - DNA, 1449 bp, Homo sapiens; identical to SEQ ID NO: 301

SEQ ID NO: 816 - DNA, 1450 bp, Homo sapiens; identical to SEQ ID NO: 302

SEQ ID NO: 817 - DNA, 956 bp, Homo sapiens; identical to SEQ ID NO: 303

SEQ ID NO: 818 - DNA, 1426 bp, Homo sapiens; identical to SEQ ID NO: 304

SEQ ID NO: 819 - DNA, 5041 bp, Homo sapiens; identical to SEQ ID NO: 305

SEQ ID NO: 820 - DNA, 4592 bp, Homo sapiens; identical to SEQ ID NO: 306

SEQ ID NO: 821 - DNA, 4502 bp, Homo sapiens; identical to SEQ ID NO: 307

SEQ ID NO: 822 - DNA, 4517 bp, Homo sapiens; identical to SEQ ID NO: 308

SEQ ID NO: 823 - DNA, 533 bp, Homo sapiens; identical to SEQ ID NO: 309

SEQ ID NO: 824 - DNA, 6189 bp, Homo sapiens; identical to SEQ ID NO: 310

SEQ ID NO: 825 - DNA, 7011 bp, Homo sapiens; identical to SEQ ID NO: 311

SEQ ID NO: 826 - DNA, 2919 bp, Homo sapiens; identical to SEQ ID NO: 312

SEQ ID NO: 827 - DNA, 1908 bp, Homo sapiens; identical to SEQ ID NO: 313

SEQ ID NO: 828 - DNA, 1086 bp, Homo sapiens; identical to SEQ ID NO: 314

SEQ ID NO: 829 - DNA, 4213 bp, Homo sapiens; identical to SEQ ID NO: 315

SEQ ID NO: 830 - DNA, 1647 bp, Homo sapiens; identical to SEQ ID NO: 316

SEQ ID NO: 831 - DNA, 1494 bp, Homo sapiens; identical to SEQ ID NO: 317

SEQ ID NO: 832 - DNA, 891 bp, Homo sapiens; identical to SEQ ID NO: 318
  misc_feature (559)..(559): n is a, c, g, or t
  misc_feature (726)..(726): n is a, c, g, or t

SEQ ID NO: 833 - DNA, 713 bp, Homo sapiens; identical to SEQ ID NO: 319

SEQ ID NO: 834 - DNA, 601 bp, Homo sapiens; identical to SEQ ID NO: 320

SEQ ID NO: 835 - DNA, 453 bp, Homo sapiens; identical to SEQ ID NO: 321
  misc_feature (288)..(288): n is a, c, g, or t
  misc_feature (318)..(318): n is a, c, g, or t
  misc_feature (326)..(326): n is a, c, g, or t
  misc_feature (404)..(404): n is a, c, g, or t

SEQ ID NO: 836 - DNA, 557 bp, Homo sapiens; identical to SEQ ID NO: 322
  misc_feature (496)..(496): n is a, c, g, or t
  misc_feature (500)..(500): n is a, c, g, or t
  misc_feature (504)..(504): n is a, c, g, or t
  misc_feature (521)..(521): n is a, c, g, or t
  misc_feature (534)..(534): n is a, c, g, or t
  misc_feature (543)..(543): n is a, c, g, or t
  misc_feature (551)..(551): n is a, c, g, or t

SEQ ID NO: 837 - DNA, 705 bp, Homo sapiens; identical to SEQ ID NO: 323
  misc_feature (467)..(467): n is a, c, g, or t

SEQ ID NO: 838 - DNA, 886 bp, Homo sapiens; identical to SEQ ID NO: 324

SEQ ID NO: 839 - DNA, 924 bp, Homo sapiens; identical to SEQ ID NO: 325

SEQ ID NO: 840 - DNA, 644 bp, Homo sapiens; identical to SEQ ID NO: 326
  misc_feature (572)..(572): n is a, c, g, or t

SEQ ID NO: 841 - DNA, 2594 bp, Homo sapiens; identical to SEQ ID NO: 327

SEQ ID NO: 842 - DNA, 681 bp, Homo sapiens; identical to SEQ ID NO: 328
  misc_feature (12)..(12): n is a, c, g, or t

SEQ ID NO: 843 - DNA, 3196 bp, Homo sapiens; identical to SEQ ID NO: 329

SEQ ID NO: 844 - DNA, 1331 bp, Homo sapiens; identical to SEQ ID NO: 330

SEQ ID NO: 845 - DNA, 724 bp, Homo sapiens; identical to SEQ ID NO: 331
  misc_feature (724)..(724): n is a, c, g, or t

SEQ ID NO: 846 - DNA, 2919 bp, Homo sapiens; identical to SEQ ID NO: 312

SEQ ID NO: 847 - DNA, 1760 bp, Homo sapiens; identical to SEQ ID NO: 333

SEQ ID NO: 848 - DNA, 1732 bp, Homo sapiens; identical to SEQ ID NO: 334

SEQ ID NO: 849 - DNA, 134292 bp, Homo sapiens; identical to SEQ ID NO: 335

SEQ ID NO: 850 - DNA, 1201 bp, Homo sapiens; identical to SEQ ID NO: 336

SEQ ID NO: 851 - DNA, 1201 bp, Homo sapiens; identical to SEQ ID NO: 337
  misc_feature (13)..(15): n is a, c, g, or t
  misc_feature (17)..(17): n is a, c, g, or t
  misc_feature (19)..(21): n is a, c, g, or t
  misc_feature (28)..(29): n is a, c, g, or t
  misc_feature (39)..(39): n is a, c, g, or t
  misc_feature (41)..(41): n is a, c, g, or t
  misc_feature (43)..(43): n is a, c, g, or t
  misc_feature (1028)..(1028): n is a, c, g, or t
  misc_feature (1032)..(1032): n is a, c, g, or t
  misc_feature (1084)..(1084): n is a, c, g, or t

SEQ ID NO: 852 - DNA, 630 bp, Homo sapiens; identical to SEQ ID NO: 338
  misc_feature (583)..(583): n is a, c, g, or t

SEQ ID NO: 853 - DNA, 1296 bp, Homo sapiens; identical to SEQ ID NO: 339
  misc_feature (71)..(72): n is a, c, g, or t
  misc_feature (75)..(75): n is a, c, g, or t
  misc_feature (77)..(77): n is a, c, g, or t

SEQ ID NO: 854 - DNA, 3778 bp, Homo sapiens; identical to SEQ ID NO: 340

SEQ ID NO: 855 - DNA, 1787 bp, Homo sapiens; identical to SEQ ID NO: 341

SEQ ID NO: 856 - DNA, 1919 bp, Homo sapiens; identical to SEQ ID NO: 342

SEQ ID NO: 857 - DNA, 937 bp, Homo sapiens; identical to SEQ ID NO: 343

SEQ ID NO: 858 - DNA, 1677 bp, Homo sapiens; identical to SEQ ID NO: 344

SEQ ID NO: 859 - DNA, 1955 bp, Homo sapiens; identical to SEQ ID NO: 345

SEQ ID NO: 860 - DNA, 1969 bp, Homo sapiens; identical to SEQ ID NO: 346
  misc_feature (57)..(61): n is a, c, g, or t

SEQ ID NO: 861 - DNA, 929 bp, Homo sapiens; identical to SEQ ID NO: 347

SEQ ID NO: 862 - DNA, 657 bp, Homo sapiens; identical to SEQ ID NO: 348
  misc_feature (326)..(326): n is a, c, g, or t
  misc_feature (374)..(374): n is a, c, g, or t
  misc_feature (402)..(402): n is a, c, g, or t
  misc_feature (423)..(423): n is a, c, g, or t
  misc_feature (437)..(437): n is a, c, g, or t
  misc_feature (471)..(471): n is a, c, g, or t
  misc_feature (490)..(490): n is a, c, g, or t
  misc_feature (493)..(493): n is a, c, g, or t
  misc_feature (515)..(515): n is a, c, g, or t
  misc_feature (530)..(530): n is a, c, g, or t
  misc_feature (542)..(542): n is a, c, g, or t
  misc_feature (558)..(558): n is a, c, g, or t
  misc_feature (576)..(576): n is a, c, g, or t
  misc_feature (583)..(583): n is a, c, g, or t
  misc_feature (588)..(588): n is a, c, g, or t
  misc_feature (590)..(590): n is a, c, g, or t
  misc_feature (594)..(594): n is a, c, g, or t
  misc_feature (597)..(597): n is a, c, g, or t
  misc_feature (604)..(604): n is a, c, g, or t
  misc_feature (608)..(608): n is a, c, g, or t
  misc_feature (612)..(612): n is a, c, g, or t
  misc_feature (625)..(625): n is a, c, g, or t
  misc_feature (631)..(631): n is a, c, g, or t
  misc_feature (634)..(634): n is a, c, g, or t
  misc_feature (649)..(650): n is a, c, g, or t

SEQ ID NO: 863 - DNA, 758 bp, Homo sapiens; identical to SEQ ID NO: 349

SEQ ID NO: 864 - DNA, 700 bp, Homo sapiens; identical to SEQ ID NO: 350

SEQ ID NO: 865 - DNA, 893 bp, Homo sapiens; identical to SEQ ID NO: 351

SEQ ID NO: 866 - DNA, 316 bp, Homo sapiens; identical to SEQ ID NO: 352

SEQ ID NO: 867 - DNA, 375 bp, Homo sapiens; identical to SEQ ID NO: 353

SEQ ID NO: 868 - DNA, 560 bp, Homo sapiens; identical to SEQ ID NO: 354
  misc_feature (374)..(374): n is a, c, g, or t
  misc_feature (376)..(376): n is a, c, g, or t
  misc_feature (401)..(401): n is a, c, g, or t
  misc_feature (417)..(417): n is a, c, g, or t
  misc_feature (435)..(435): n is a, c, g, or t
  misc_feature (457)..(457): n is a, c, g, or t
  misc_feature (470)..(470): n is a, c, g, or t
  misc_feature (492)..(494): n is a, c, g, or t
  misc_feature (511)..(511): n is a, c, g, or t
  misc_feature (516)..(517): n is a, c, g, or t
  misc_feature (520)..(521): n is a, c, g, or t
  misc_feature (524)..(524): n is a, c, g, or t
  misc_feature (529)..(530): n is a, c, g, or t
  misc_feature (537)..(537): n is a, c, g, or t
  misc_feature (547)..(547): n is a, c, g, or t
  misc_feature (554)..(554): n is a, c, g, or t
  misc_feature (556)..(556): n is a, c, g, or t

SEQ ID NO: 869 - DNA, 348 bp, Homo sapiens; identical to SEQ ID NO: 355

SEQ ID NO: 870 - DNA, 505 bp, Homo sapiens; identical to SEQ ID NO: 356
  misc_feature (457)..(457): n is a, c, g, or t

SEQ ID NO: 871 - DNA, 430 bp, Homo sapiens; identical to SEQ ID NO: 357
  misc_feature (120)..(120): n is a, c, g, or t
  misc_feature (339)..(339): n is a, c, g, or t
  misc_feature (386)..(386): n is a, c, g, or t

SEQ ID NO: 872 - DNA, 556 bp, Homo sapiens; identical to SEQ ID NO: 152

SEQ ID NO: 873 - DNA, 2586 bp, Homo sapiens; identical to SEQ ID NO: 359
  misc_feature (2317)..(2317): n is a, c, g, or t

SEQ ID NO: 874 - DNA, 1448 bp, Homo sapiens; identical to SEQ ID NO: 234

SEQ ID NO: 875 - DNA, 2227 bp, Homo sapiens; identical to SEQ ID NO: 109

SEQ ID NO: 876 - DNA, 205 bp, Homo sapiens; identical to SEQ ID NO: 362

SEQ ID NO: 877 - DNA, 354 bp, Homo sapiens; identical to SEQ ID NO: 363

SEQ ID NO: 878 - DNA, 354 bp, Homo sapiens; identical to SEQ ID NO: 364

SEQ ID NO: 879 - DNA, 713 bp, Homo sapiens; identical to SEQ ID NO: 365
  misc_feature (536)..(536): n is a, c, g, or t
  misc_feature (551)..(551): n is a, c, g, or t
  misc_feature (598)..(598): n is a, c, g, or t
  misc_feature (661)..(661): n is a, c, g, or t
  misc_feature (686)..(686): n is a, c, g, or t
  misc_feature (699)..(699): n is a, c, g, or t
  misc_feature (707)..(709): n is a, c, g, or t

SEQ ID NO: 880 - DNA, 261 bp, Homo sapiens; identical to SEQ ID NO: 366
  misc_feature (200)..(200): n is a, c, g, or t
  misc_feature (212)..(212): n is a, c, g, or t
  misc_feature (215)..(215): n is a, c, g, or t
  misc_feature (226)..(226): n is a, c, g, or t
  misc_feature (228)..(228): n is a, c, g, or t
  misc_feature (231)..(231): n is a, c, g, or t
  misc_feature (242)..(242): n is a, c, g, or t
  misc_feature (244)..(245): n is a, c, g, or t
  misc_feature (249)..(250): n is a, c, g, or t
  misc_feature (257)..(257): n is a, c, g, or t
  misc_feature (259)..(259): n is a, c, g, or t

SEQ ID NO: 881 - DNA, 354 bp, Homo sapiens; identical to SEQ ID NO: 363

SEQ ID NO: 882 - DNA, 355 bp, Homo sapiens; identical to SEQ ID NO: 368

SEQ ID NO: 883 - DNA, 599 bp, Homo sapiens; identical to SEQ ID NO: 369
  misc_feature (374)..(374): n is a, c, g, or t
  misc_feature (538)..(538): n is a, c, g, or t
  misc_feature (556)..(556): n is a, c, g, or t

SEQ ID NO: 884 - DNA, 545 bp, Homo sapiens; identical to SEQ ID NO: 370
  misc_feature (479)..(479): n is a, c, g, or t
  misc_feature (532)..(532): n is a, c, g, or t

SEQ ID NO: 885 - DNA, 387 bp, Homo sapiens; identical to SEQ ID NO: 371
  misc_feature (358)..(358): n is a, c, g, or t

SEQ ID NO: 886 - DNA, 178 bp, Homo sapiens; identical to SEQ ID NO: 372

SEQ ID NO: 887 - DNA, 387 bp, Homo sapiens; identical to SEQ ID NO: 373

SEQ ID NO: 888 - DNA, 420 bp, Homo sapiens; identical to SEQ ID NO: 374

SEQ ID NO: 889 - DNA, 402 bp, Homo sapiens; identical to SEQ ID NO: 375
  misc_feature (305)..(305): n is a, c, g, or t
  misc_feature (353)..(353): n is a, c, g, or t
  misc_feature (368)..(368): n is a, c, g, or t
  misc_feature (391)..(391): n is a, c, g, or t

SEQ ID NO: 890 - DNA, 145 bp, Homo sapiens; identical to SEQ ID NO: 376
  misc_feature (32)..(32): n is a, c, g, or t
  misc_feature (53)..(53): n is a, c, g, or t
  misc_feature (55)..(55): n is a, c, g, or t
  misc_feature (61)..(61): n is a, c, g, or t
  misc_feature (77)..(77): n is a, c, g, or t
  misc_feature (101)..(101): n is a, c, g, or t

SEQ ID NO: 891 - DNA, 148 bp, Homo sapiens; identical to SEQ ID NO: 377

SEQ ID NO: 892 - DNA, 642 bp, Homo sapiens; identical to SEQ ID NO: 378
  misc_feature (365)..(365): n is a, c, g, or t
  misc_feature (372)..(372): n is a, c, g, or t
  misc_feature (523)..(523): n is a, c, g, or t
  misc_feature (533)..(533): n is a, c, g, or t
  misc_feature (538)..(538): n is a, c, g, or t
  misc_feature (543)..(543): n is a, c, g, or t
  misc_feature (559)..(560): n is a, c, g, or t
  misc_feature (571)..(571): n is a, c, g, or t
  misc_feature (588)..(588): n is a, c, g, or t
  misc_feature (590)..(590): n is a, c, g, or t
  misc_feature (593)..(593): n is a, c, g, or t
  misc_feature (596)..(596): n is a, c, g, or t
  misc_feature (605)..(605): n is a, c, g, or t
  misc_feature (614)..(614): n is a, c, g, or t
  misc_feature (629)..(629): n is a, c, g, or t
  misc_feature (639)..(639): n is a, c, g, or t

SEQ ID NO: 893 - DNA, 540 bp, Homo sapiens; identical to SEQ ID NO: 379
  misc_feature (428)..(428): n is a, c, g, or t
  misc_feature (443)..(444): n is a, c, g, or t
  misc_feature (464)..(464): n is a, c, g, or t
  misc_feature (471)..(471): n is a, c, g, or t
  misc_feature (477)..(477): n is a, c, g, or t
  misc_feature (496)..(496): n is a, c, g, or t
  misc_feature (507)..(507): n is a, c, g, or t
  misc_feature (509)..(510): n is a, c, g, or t

SEQ ID NO: 894 - DNA, 460 bp, Homo sapiens; identical to SEQ ID NO: 380
  misc_feature (304)..(304): n is a, c, g, or t
  misc_feature (344)..(344): n is a, c, g, or t
  misc_feature (371)..(371): n is a, c, g, or t
  misc_feature (411)..(411): n is a, c, g, or t
  misc_feature (418)..(418): n is a, c, g, or t
  misc_feature (432)..(432): n is a, c, g, or t
  misc_feature (434)..(434): n is a, c, g, or t
  misc_feature (441)..(441): n is a, c, g, or t
  misc_feature (446)..(446): n is a, c, g, or t
  misc_feature (448)..(448): n is a, c, g, or t
  misc_feature (454)..(454): n is a, c, g, or t

SEQ ID NO: 895 - DNA, 500 bp, Homo sapiens; identical to SEQ ID NO: 381
  misc_feature (311)..(311): n is a, c, g, or t
  misc_feature (368)..(368): n is a, c, g, or t
  misc_feature (391)..(391): n is a, c, g, or t
  misc_feature (399)..(399): n is a, c, g, or t
  misc_feature (403)..(403): n is a, c, g, or t
  misc_feature (406)..(406): n is a, c, g, or t
  misc_feature (421)..(421): n is a, c, g, or t
  misc_feature (423)..(423): n is a, c, g, or t
  misc_feature (429)..(429): n is a, c, g, or t
  misc_feature (436)..(436): n is a, c, g, or t
  misc_feature (444)..(444): n is a, c, g, or t
  misc_feature (462)..(462): n is a, c, g, or t
  misc_feature (467)..(467): n is a, c, g, or t
  misc_feature (472)..(472): n is a, c, g, or t
  misc_feature (479)..(479): n is a, c, g, or t
  misc_feature (484)..(487): n is a, c, g, or t

SEQ ID NO: 896 - DNA, 266 bp, Homo sapiens; identical to SEQ ID NO: 382

SEQ ID NO: 897 - DNA, 268 bp, Homo sapiens; identical to SEQ ID NO: 383
  misc_feature (210)..(210): n is a, c, g, or t
  misc_feature (223)..(223): n is a, c, g, or t
  misc_feature (226)..(227): n is a, c, g, or t
  misc_feature (256)..(256): n is a, c, g, or t
  misc_feature (259)..(259): n is a, c, g, or t

SEQ ID NO: 898 - DNA, 427 bp, Homo sapiens; identical to SEQ ID NO: 384
  misc_feature (68)..(68): n is a, c, g, or t
  misc_feature (360)..(360): n is a, c, g, or t

SEQ ID NO: 899 - DNA, 757 bp, Homo sapiens; identical to SEQ ID NO: 385
  misc_feature (326)..(326): n is a, c, g, or t
  misc_feature (374)..(374): n is a, c, g, or t
  misc_feature (377)..(377): n is a, c, g, or t
  misc_feature (408)..(408): n is a, c, g, or t
  misc_feature (411)..(411): n is a, c, g, or t
  misc_feature (432)..(432): n is a, c, g, or t
  misc_feature (447)..(447): n is a, c, g, or t
  misc_feature (464)..(464): n is a, c, g, or t
  misc_feature (468)..(468): n is a, c, g, or t
  misc_feature (470)..(470): n is a, c, g, or t
  misc_feature (476)..(476): n is a, c, g, or t
  misc_feature (489)..(489): n is a, c, g, or t
  misc_feature (508)..(508): n is a, c, g, or t
  misc_feature (518)..(518): n is a, c, g, or t
  misc_feature (528)..(528): n is a, c, g, or t
  misc_feature (544)..(544): n is a, c, g, or t
  misc_feature (554)..(554): n is a, c, g, or t
  misc_feature (565)..(566): n is a, c, g, or t
  misc_feature (570)..(570): n is a, c, g, or t
  misc_feature (578)..(578): n is a, c, g, or t
  misc_feature (580)..(581): n is a, c, g, or t
  misc_feature (584)..(584): n is a, c, g, or t
  misc_feature (587)..(587): n is a, c, g, or t
  misc_feature (589)..(589): n is a, c, g, or t
  misc_feature (596)..(597): n is a, c, g, or t
  misc_feature (599)..(599): n is a, c, g, or t
  misc_feature (605)..(610): n is a, c, g, or t
  misc_feature (613)..(613): n is a, c, g, or t
  misc_feature (637)..(637): n is a, c, g, or t
  misc_feature (639)..(640): n is a, c, g, or t
  misc_feature (644)..(648): n is a, c, g, or t
  misc_feature (650)..(651): n is a, c, g, or t
  misc_feature (666)..(666): n is a, c, g, or t
  misc_feature (668)..(668): n is a, c, g, or t
  misc_feature (670)..(671): n is a, c, g, or t
  misc_feature (681)..(683): n is a, c, g, or t
  misc_feature (687)..(687): n is a, c, g, or t
  misc_feature (689)..(689): n is a, c, g, or t
  misc_feature (692)..(692): n is a, c, g, or t
  misc_feature (696)..(696): n is a, c, g, or t
  misc_feature (698)..(698): n is a, c, g, or t
  misc_feature (700)..(700): n is a, c, g, or t
  misc_feature (702)..(703): n is a, c, g, or t
  misc_feature (705)..(706): n is a, c, g, or t
  misc_feature (710)..(711): n is a, c, g, or t
  misc_feature (717)..(717): n is a, c, g, or t
  misc_feature (720)..(721): n is a, c, g, or t
  misc_feature (726)..(726): n is a, c, g, or t
  misc_feature (728)..(730): n is a, c, g, or t
  misc_feature (732)..(733): n is a, c, g, or t
  misc_feature (735)..(735): n is a, c, g, or t
  misc_feature (739)..(739): n is a, c, g, or t
  misc_feature (741)..(741): n is a, c, g, or t
  misc_feature (754)..(754): n is a, c, g, or t

SEQ ID NO: 900 - DNA, 285 bp, Homo sapiens; identical to SEQ ID NO: 386

SEQ ID NO: 901 - DNA, 283 bp, Homo sapiens; identical to SEQ ID NO: 387

SEQ ID NO: 902 - DNA, 765 bp, Homo sapiens; identical to SEQ ID NO: 388
  misc_feature (183)..(183): n is a, c, g, or t
  misc_feature (486)..(486): n is a, c, g, or t
  misc_feature (515)..(515): n is a, c, g, or t
  misc_feature (524)..(524): n is a, c, g, or t
  misc_feature (537)..(537): n is a, c, g, or t
  misc_feature (564)..(564): n is a, c, g, or t
  misc_feature (571)..(571): n is a, c, g, or t
  misc_feature (582)..(582): n is a, c, g, or t
  misc_feature (584)..(584): n is a, c, g, or t
  misc_feature (598)..(598): n is a, c, g, or t
  misc_feature (626)..(626): n is a, c, g, or t
  misc_feature (636)..(637): n is a, c, g, or t
  misc_feature (641)..(641): n is a, c, g, or t
  misc_feature (647)..(647): n is a, c, g, or t
  misc_feature (651)..(651): n is a, c, g, or t
  misc_feature (653)..(653): n is a, c, g, or t
  misc_feature (656)..(656): n is a, c, g, or t
  misc_feature (663)..(664): n is a, c, g, or t
  misc_feature (674)..(674): n is a, c, g, or t
  misc_feature (677)..(677): n is a, c, g, or t
  misc_feature (679)..(679): n is a, c, g, or t
  misc_feature (682)..(683): n is a, c, g, or t
  misc_feature (685)..(687): n is a, c, g, or t
  misc_feature (697)..(697): n is a, c, g, or t
  misc_feature (710)..(710): n is a, c, g, or t
  misc_feature (714)..(714): n is a, c, g, or t
  misc_feature (718)..(718): n is a, c, g, or t
  misc_feature (733)..(733): n is a, c, g, or t
  misc_feature (735)..(735): n is a, c, g, or t
  misc_feature (737)..(737): n is a, c, g, or t
  misc_feature (739)..(739): n is a, c, g, or t
  misc_feature (746)..(746): n is a, c, g, or t
  misc_feature (748)..(748): n is a, c, g, or t
  misc_feature (750)..(750): n is a, c, g, or t
  misc_feature (756)..(756): n is a, c, g, or t
  misc_feature (758)..(759): n is a, c, g, or t
  misc_feature (762)..(762): n is a, c, g, or t

SEQ ID NO: 903 - DNA, 584 bp, Homo sapiens; identical to SEQ ID NO: 389
  misc_feature (129)..(129): n is a, c, g, or t
  misc_feature (226)..(226): n is a, c, g, or t
  misc_feature (244)..(244): n is a, c, g, or t
  misc_feature (273)..(273): n is a, c, g, or t
  misc_feature (363)..(363): n is a, c, g, or t
  misc_feature (400)..(400): n is a, c, g, or t
  misc_feature (419)..(419): n is a, c, g, or t
  misc_feature (430)..(430): n is a, c, g, or t
  misc_feature (435)..(435): n is a, c, g, or t
  misc_feature (455)..(455): n is a, c, g, or t
  misc_feature (458)..(458): n is a, c, g, or t
  misc_feature (463)..(463): n is a, c, g, or t
  misc_feature (482)..(483): n is a, c, g, or t
  misc_feature (485)..(487): n is a, c, g, or t
  misc_feature (490)..(491): n is a, c, g, or t
  misc_feature (493)..(493): n is a, c, g, or t
  misc_feature (507)..(508): n is a, c, g, or t
  misc_feature (512)..(512): n is a, c, g, or t
  misc_feature (515)..(515): n is a, c, g, or t
  misc_feature (517)..(517): n is a, c, g, or t
  misc_feature (519)..(520): n is a, c, g, or t
  misc_feature (526)..(526): n is a, c, g, or t
  misc_feature (533)..(533): n is a, c, g, or t
  misc_feature (535)..(536): n is a, c, g, or t
  misc_feature (538)..(538): n is a, c, g, or t
  misc_feature (541)..(541): n is a, c, g, or t
  misc_feature (544)..(545): n is a, c, g, or t
  misc_feature (547)..(547): n is a, c, g, or t
  misc_feature (549)..(549): n is a, c, g, or t
  misc_feature (552)..(552): n is a, c, g, or t
  misc_feature (557)..(557): n is a, c, g, or t
  misc_feature (562)..(563): n is a, c, g, or t
  misc_feature (565)..(565): n is a, c, g, or t
  misc_feature (578)..(578): n is a, c, g, or t
  misc_feature (580)..(580): n is a, c, g, or t

SEQ ID NO: 904 - DNA, 439 bp, Homo sapiens; identical to SEQ ID NO: 390
  misc_feature (247)..(247): n is a, c, g, or t
  misc_feature (262)..(262): n is a, c, g, or t
  misc_feature (268)..(268): n is a, c, g, or t
  misc_feature (279)..(279): n is a, c, g, or t
  misc_feature (284)..(284): n is a, c, g, or t
  misc_feature (286)..(286): n is a, c, g, or t
  misc_feature (291)..(291): n is a, c, g, or t
  misc_feature (293)..(293): n is a, c, g, or t
  misc_feature (310)..(310): n is a, c, g, or t
  misc_feature (312)..(312): n is a, c, g, or t
  misc_feature (317)..(317): n is a, c, g, or t
  misc_feature (327)..(327): n is a, c, g, or t
  misc_feature (329)..(329): n is a, c, g, or t
  misc_feature (336)..(337): n is a, c, g, or t
  misc_feature (348)..(348): n is a, c, g, or t
  misc_feature (351)..(351): n is a, c, g, or t
  misc_feature (355)..(355): n is a, c, g, or t
  misc_feature (357)..(357): n is a, c, g, or t
  misc_feature (359)..(360): n is a, c, g, or t
  misc_feature (362)..(365): n is a, c, g, or t
  misc_feature (367)..(369): n is a, c, g, or t
  misc_feature (371)..(372): n is a, c, g, or t
  misc_feature (374)..(374): n is a, c, g, or t
  misc_feature (381)..(382): n is a, c, g, or t
  misc_feature (384)..(384): n is a, c, g, or t
  misc_feature (393)..(393): n is a, c, g, or t
  misc_feature (398)..(398): n is a, c, g, or t
  misc_feature (404)..(404): n is a, c, g, or t
  misc_feature (411)..(411): n is a, c, g, or t
  misc_feature (415)..(415): n is a, c, g, or t
  misc_feature (417)..(417): n is a, c, g, or t
  misc_feature (426)..(426): n is a, c, g, or t
  misc_feature (428)..(430): n is a, c, g, or t

SEQ ID NO: 905 - DNA, 335 bp, Homo sapiens; identical to SEQ ID NO: 391
  misc_feature (247)..(247): n is a, c, g, or t
  misc_feature (262)..(262): n is a, c, g, or t
  misc_feature (268)..(268): n is a, c, g, or t
  misc_feature (279)..(279): n is a, c, g, or t
  misc_feature (284)..(284): n is a, c, g, or t
  misc_feature (286)..(286): n is a, c, g, or t
  misc_feature (291)..(291): n is a, c, g, or t
  misc_feature (293)..(293): n is a, c, g, or t
  misc_feature (310)..(310): n is a, c, g, or t
  misc_feature (312)..(312): n is a, c, g, or t
  misc_feature (317)..(317): n is a, c, g, or t
  misc_feature (327)..(327): n is a, c, g, or t
  misc_feature (329)..(329): n is a, c, g, or t

SEQ ID NO: 906 - DNA, 768 bp, Homo sapiens; identical to SEQ ID NO: 392
  misc_feature (368)..(368): n is a, c, g, or t
  misc_feature (376)..(376): n is a, c, g, or t
  misc_feature (388)..(388): n is a, c, g, or t
  misc_feature (436)..(436): n is a, c, g, or t
  misc_feature (479)..(479): n is a, c, g, or t
  misc_feature (484)..(484): n is a, c, g, or t
  misc_feature (486)..(486): n is a, c, g, or t
  misc_feature (498)..(498): n is a, c, g, or t
  misc_feature (517)..(517): n is a, c, g, or t
  misc_feature (554)..(554): n is a, c, g, or t
  misc_feature (562)..(562): n is a, c, g, or t
  misc_feature (569)..(569): n is a, c, g, or t
  misc_feature (583)..(583): n is a, c, g, or t
  misc_feature (598)..(598): n is a, c, g, or t
  misc_feature (607)..(607): n is a, c, g, or t
  misc_feature (610)..(610): n is a, c, g, or t
  misc_feature (619)..(619): n is a, c, g, or t
  misc_feature (625)..(625): n is a, c, g, or t
  misc_feature (643)..(643): n is a, c, g, or t
  misc_feature (645)..(645): n is a, c, g, or t
  misc_feature (648)..(648): n is a, c, g, or t
  misc_feature (655)..(655): n is a, c, g, or t
  misc_feature (660)..(660): n is a, c, g, or t
  misc_feature (672)..(673): n is a, c, g, or t
  misc_feature (681)..(681): n is a, c, g, or t
  misc_feature (694)..(695): n is a, c, g, or t
  misc_feature (700)..(700): n is a, c, g, or t
  misc_feature (707)..(707): n is a, c, g, or t
  misc_feature (713)..(713): n is a, c, g, or t
  misc_feature (719)..(720): n is a, c, g, or t
  misc_feature (722)..(722): n is a, c, g, or t
  misc_feature (725)..(725): n is a, c, g, or t
  misc_feature (732)..(735): n is a, c, g, or t
  misc_feature (737)..(737): n is a, c, g, or t
  misc_feature (740)..(741): n is a, c, g, or t
  misc_feature (743)..(743): n is a, c, g, or t
  misc_feature (750)..(750): n is a, c, g, or t
  misc_feature (753)..(754): n is a, c, g, or t
  misc_feature (757)..(757): n is a, c, g, or t
  misc_feature (762)..(762): n is a, c, g, or t

SEQ ID NO: 907 - DNA, 498 bp, Homo sapiens; identical to SEQ ID NO: 393
  misc_feature (364)..(364): n is a, c, g, or t
  misc_feature (366)..(366): n is a, c, g, or t
  misc_feature (396)..(396): n is a, c, g, or t
  misc_feature (401)..(401): n is a, c, g, or t
  misc_feature (407)..(407): n is a, c, g, or t
  misc_feature (443)..(443): n is a, c, g, or t
  misc_feature (450)..(450): n is a, c, g, or t
  misc_feature (455)..(455): n is a, c, g, or t
  misc_feature (457)..(457): n is a, c, g, or t
  misc_feature (470)..(470): n is a, c, g, or t
  misc_feature (474)..(474): n is a, c, g, or t
  misc_feature (483)..(483): n is a, c, g, or t

SEQ ID NO: 908 - DNA, 428 bp, Homo sapiens; identical to SEQ ID NO: 394

SEQ ID NO: 909 - DNA, 426 bp, Homo sapiens; identical to SEQ ID NO: 395
  misc_feature (413)..(413): n is a, c, g, or t
  misc_feature (421)..(421): n is a, c, g, or t

SEQ ID NO: 910 - DNA, 570 bp, Homo sapiens; identical to SEQ ID NO: 396
  misc_feature (479)..(479): n is a, c, g, or t
  misc_feature (511)..(511): n is a, c, g, or t
  misc_feature (520)..(520): n is a, c, g, or t
  misc_feature (524)..(524): n is a, c, g, or t
  misc_feature (532)..(532): n is a, c, g, or t
  misc_feature (540)..(540): n is a, c, g, or t
  misc_feature (557)..(557): n is a, c, g, or t
  misc_feature (559)..(560): n is a, c, g, or t
  misc_feature (563)..(563): n is a, c, g, or t
  misc_feature (566)..(566): n is a, c, g, or t

SEQ ID NO: 911 - DNA, 669 bp, Homo sapiens; identical to SEQ ID NO: 397
  misc_feature (424)..(424): n is a, c, g, or t
  misc_feature (443)..(443): n is a, c, g, or t
  misc_feature (490)..(490): n is a, c, g, or t
  misc_feature (492)..(492): n is a, c, g, or t
  misc_feature (500)..(500): n is a, c, g, or t
  misc_feature (523)..(524): n is a, c, g, or t
  misc_feature (536)..(536): n is a, c, g, or t
  misc_feature (543)..(543): n is a, c, g, or t
  misc_feature (548)..(548): n is a, c, g, or t
  misc_feature (557)..(557): n is a, c, g, or t
  misc_feature (581)..(581): n is a, c, g, or t
  misc_feature (602)..(602): n is a, c, g, or t
  misc_feature (605)..(605): n is a, c, g, or t
  misc_feature (614)..(614): n is a, c, g, or t
  misc_feature (617)..(617): n is a, c, g, or t
  misc_feature (623)..(623): n is a, c, g, or t
  misc_feature (626)..(626): n is a, c, g, or t
  misc_feature (630)..(630): n is a, c, g, or t
  misc_feature (632)..(632): n is a, c, g, or t
  misc_feature (641)..(641): n is a, c, g, or t
  misc_feature (647)..(650): n is a, c, g, or t
  misc_feature (652)..(652): n is a, c, g, or t
  misc_feature (661)..(661): n is a, c, g, or t
  misc_feature (663)..(663): n is a, c, g, or t

SEQ ID NO: 912 - DNA, 719 bp, Homo sapiens; identical to SEQ ID NO: 398
  misc_feature (37)..(37): n is a, c, g, or t
  misc_feature (39)..(39): n is a, c, g, or t
  misc_feature (399)..(399): n is a, c, g, or t
  misc_feature (432)..(432): n is a, c, g, or t
  misc_feature (441)..(441): n is a, c, g, or t
  misc_feature (478)..(478): n is a, c, g, or t
  misc_feature (490)..(490): n is a, c, g, or t
  misc_feature (498)..(498): n is a, c, g, or t
  misc_feature (500)..(500): n is a, c, g, or t
  misc_feature (512)..(512): n is a, c, g, or t
  misc_feature (527)..(527): n is a, c, g, or t
  misc_feature (539)..(539): n is a, c, g, or t
  misc_feature (572)..(572): n is a, c, g, or t
  misc_feature (574)..(574): n is a, c, g, or t
  misc_feature (584)..(584): n is a, c, g, or t
  misc_feature (587)..(587): n is a, c, g, or t
  misc_feature (590)..(590): n is a, c, g, or t
  misc_feature (596)..(596): n is a, c, g, or t
  misc_feature (599)..(599): n is a, c, g, or t
  misc_feature (614)..(614): n is a, c, g, or t
  misc_feature (623)..(623): n is a, c, g, or t
  misc_feature (635)..(635): n is a, c, g, or t
  misc_feature (639)..(639): n is a, c, g, or t
  misc_feature (647)..(647): n is a, c, g, or t
  misc_feature (652)..(653): n is a, c, g, or t
  misc_feature (659)..(659): n is a, c, g, or t
  misc_feature (664)..(664): n is a, c, g, or t
  misc_feature (669)..(669): n is a, c, g, or t
  misc_feature (677)..(677): n is a, c, g, or t
  misc_feature (684)..(685): n is a, c, g, or t
  misc_feature (687)..(688): n is a, c, g, or t
  misc_feature (696)..(697): n is a, c, g, or t
  misc_feature (702)..(702): n is a, c, g, or t
  misc_feature (705)..(706): n is a, c, g, or t

SEQ ID NO: 913 - DNA, 786 bp, Homo sapiens; identical to SEQ ID NO: 399
  misc_feature (443)..(443): n is a, c, g, or t
  misc_feature (531)..(533): n is a, c, g, or t
  misc_feature (535)..(535): n is a, c, g, or t
  misc_feature (542)..(542): n is a, c, g, or t
  misc_feature (551)..(551): n is a, c, g, or t
  misc_feature (584)..(584): n is a, c, g, or t
  misc_feature (588)..(588): n is a, c, g, or t
  misc_feature (619)..(619): n is a, c, g, or t
  misc_feature (622)..(622): n is a, c, g, or t
  misc_feature (625)..(625): n is a, c, g, or t
  misc_feature (627)..(627): n is a, c, g, or t
  misc_feature (641)..(641): n is a, c, g, or t
  misc_feature (663)..(663): n is a, c, g, or t
  misc_feature (666)..(666): n is a, c, g, or t
  misc_feature (686)..(686): n is a, c, g, or t
  misc_feature (700)..(700): n is a, c, g, or t
  misc_feature (709)..(709): n is a, c, g, or t
  misc_feature (714)..(714): n is a, c, g, or t
  misc_feature (716)..(716): n is a, c, g, or t
  misc_feature (723)..(723): n is a, c, g, or t
  misc_feature (727)..(727): n is a, c, g, or t
  misc_feature (729)..(729): n is a, c, g, or t
  misc_feature (744)..(746): n is a, c, g, or t
  misc_feature (750)..(750): n is a, c, g, or t
  misc_feature (754)..(754): n is a, c, g, or t
  misc_feature (757)..(757): n is a, c, g, or t
  misc_feature (766)..(766): n is a, c, g, or t
  misc_feature (768)..(768): n is a, c, g, or t
  misc_feature (772)..(773): n is a, c, g, or t
  misc_feature (776)..(776): n is a, c, g, or t
  misc_feature (785)..(785): n is a, c, g, or t

SEQ ID NO: 914 - DNA, 469 bp, Homo sapiens; identical to SEQ ID NO: 400
  misc_feature (302)..(302): n is a, c, g, or t
  misc_feature (317)..(317): n is a, c, g, or t
  misc_feature (329)..(329): n is a, c, g, or t
  misc_feature (354)..(354): n is a, c, g, or t
  misc_feature (357)..(357): n is a, c, g, or t
  misc_feature (367)..(367): n is a, c, g, or t
  misc_feature (391)..(391): n is a, c, g, or t
  misc_feature (397)..(397): n is a, c, g, or t
  misc_feature (422)..(422): n is a, c, g, or t
  misc_feature (428)..(428): n is a, c, g, or t
  misc_feature (439)..(439): n is a, c, g, or t
  misc_feature (444)..(444): n is a, c, g, or t
  misc_feature (450)..(450): n is a, c, g, or t
  misc_feature (465)..(465): n is a, c, g, or t

SEQ ID NO: 915 - DNA, 716 bp, Homo sapiens; identical to SEQ ID NO: 401
  misc_feature (165)..(165): n is a, c, g, or t
  misc_feature (427)..(427): n is a, c, g, or t
  misc_feature (435)..(435): n is a, c, g, or t
  misc_feature (440)..(440): n is a, c, g, or t
  misc_feature (445)..(445): n is a, c, g, or t
  misc_feature (450)..(450): n is a, c, g, or t
  misc_feature (466)..(466): n is a, c, g, or t
  misc_feature (483)..(483): n is a, c, g, or t
  misc_feature (494)..(494): n is a, c, g, or t
  misc_feature (503)..(503): n is a, c, g, or t
  misc_feature (507)..(507): n is a, c, g, or t
  misc_feature (556)..(556): n is a, c, g, or t
  misc_feature (558)..(558): n is a, c, g, or t
  misc_feature (562)..(562): n is a, c, g, or t
  misc_feature (571)..(572): n is a, c, g, or t
  misc_feature (576)..(576): n is a, c, g, or t
  misc_feature (581)..(581): n is a, c, g, or t
  misc_feature (583)..(583): n is a, c, g, or t
  misc_feature (587)..(587): n is a, c, g, or t
  misc_feature (594)..(594): n is a, c, g, or t
  misc_feature (599)..(599): n is a, c, g, or t
  misc_feature (608)..(608): n is a, c, g, or t
  misc_feature (621)..(621): n is a, c, g, or t
  misc_feature (628)..(628): n is a, c, g, or t
  misc_feature (638)..(638): n is a, c, g, or t
  misc_feature (644)..(644): n is a, c, g, or t
  misc_feature (646)..(647): n is a, c, g, or t
  misc_feature (667)..(667): n is a, c, g, or t
  misc_feature (674)..(674): n is a, c, g, or t
  misc_feature (684)..(684): n is a, c, g, or t
  misc_feature (691)..(691): n is a, c, g, or t
  misc_feature (695)..(695): n is a, c, g, or t
  misc_feature (699)..(700): n is a, c, g, or t

SEQ ID NO: 916 - DNA, 602 bp, Homo sapiens; identical to SEQ ID NO: 402
  misc_feature (575)..(575): n is a, c, g, or t
  misc_feature (584)..(584): n is a, c, g, or t

SEQ ID NO: 917 - DNA, 612 bp, Homo sapiens; identical to SEQ ID NO: 403
  misc_feature (335)..(335): n is a, c, g, or t
  misc_feature (361)..(361): n is a, c, g, or t
  misc_feature (364)..(364): n is a, c, g, or t
  misc_feature (370)..(370): n is a, c, g, or t
  misc_feature (393)..(394): n is a, c, g, or t
  misc_feature (402)..(402): n is a, c, g, or t
  misc_feature (409)..(409): n is a, c, g, or t
  misc_feature (418)..(418): n is a, c, g, or t
  misc_feature (430)..(430): n is a, c, g, or t
  misc_feature (461)..(461): n is a, c, g, or t
  misc_feature (465)..(465): n is a, c, g, or t
  misc_feature (468)..(468): n is a, c, g, or t
  misc_feature (476)..(476): n is a, c, g, or t
  misc_feature (478)..(479): n is a, c, g, or t
  misc_feature (482)..(483): n is a, c, g, or t
  misc_feature (485)..(486): n is a, c, g, or t
  misc_feature (490)..(491): n is a, c, g, or t
  misc_feature (496)..(499): n is a, c, g, or t
  misc_feature (503)..(503): n is a, c, g, or t
  misc_feature (506)..(506): n is a, c, g, or t
  misc_feature (512)..(512): n is a, c, g, or t
  misc_feature (519)..(519): n is a, c, g, or t
  misc_feature (546)..(546): n is a, c, g, or t
  misc_feature (554)..(554): n is a, c, g, or t
  misc_feature (558)..(558): n is a, c, g, or t
  misc_feature (570)..(570): n is a, c, g, or t
  misc_feature (574)..(574): n is a, c, g, or t
  misc_feature (576)..(577): n is a, c, g, or t
  misc_feature (600)..(601): n is a, c, g, or t
  misc_feature (606)..(606): n is a, c, g, or t
  misc_feature (609)..(609): n is a, c, g, or t

SEQ ID NO: 918 - DNA, 640 bp, Homo sapiens; identical to SEQ ID NO: 404
  misc_feature (264)..(264): n is a, c, g, or t
  misc_feature (403)..(403): n is a, c, g, or t
  misc_feature (419)..(419): n is a, c, g, or t
  misc_feature (425)..(425): n is a, c, g, or t
  misc_feature (444)..(444): n is a, c, g, or t
  misc_feature (457)..(457): n is a, c, g, or t
  misc_feature (502)..(502): n is a, c, g, or t
  misc_feature (508)..(508): n is a, c, g, or t
  misc_feature (513)..(513): n is a, c, g, or t
  misc_feature (528)..(528): n is a, c, g, or t
  misc_feature (531)..(531): n is a, c, g, or t
  misc_feature (536)..(536): n is a, c, g, or t
  misc_feature (538)..(538): n is a, c, g, or t
  misc_feature (546)..(546): n is a, c, g, or t
  misc_feature (548)..(549): n is a, c, g, or t
  misc_feature (554)..(554): n is a, c, g, or t
  misc_feature (588)..(588): n is a, c, g, or t
  misc_feature (590)..(590): n is a, c, g, or t
  misc_feature (592)..(592): n is a, c, g, or t
  misc_feature (595)..(595): n is a, c, g, or t
  misc_feature (597)..(598): n is a, c, g, or t
  misc_feature (600)..(600): n is a, c, g, or t
  misc_feature (604)..(604): n is a, c, g, or t
  misc_feature (606)..(606): n is a, c, g, or t
  misc_feature (615)..(616): n is a, c, g, or t
  misc_feature (622)..(622): n is a, c, g, or t
  misc_feature (625)..(625): n is a, c, g, or t
  misc_feature (629)..(629): n is a, c, g, or t
  misc_feature (631)..(632): n is a, c, g, or t
  misc_feature (634)..(634): n is a, c, g, or t

SEQ ID NO: 919 - DNA, 469 bp, Homo sapiens; identical to SEQ ID NO: 405
  misc_feature (261)..(261): n is a, c, g, or t
  misc_feature (317)..(318): n is a, c, g, or t
  misc_feature (321)..(321): n is a, c, g, or t
  misc_feature (324)..(324): n is a, c, g, or t
  misc_feature (329)..(329): n is a, c, g, or t
  misc_feature (332)..(332): n is a, c, g, or t
  misc_feature (334)..(334): n is a, c, g, or t
  misc_feature (336)..(336): n is a, c, g, or t
  misc_feature (339)..(339): n is a, c, g, or t
  misc_feature (345)..(345): n is a, c, g, or t
  misc_feature (357)..(357): n is a, c, g, or t
  misc_feature (363)..(363): n is a, c, g, or t
  misc_feature (366)..(366): n is a, c, g, or t
  misc_feature (377)..(377): n is a, c, g, or t
  misc_feature (379)..(379): n is a, c, g, or t
  misc_feature (385)..(385): n is a, c, g, or t
  misc_feature (388)..(388): n is a, c, g, or t
  misc_feature (390)..(390): n is a, c, g, or t
  misc_feature (392)..(392): n is a, c, g, or t
  misc_feature (409)..(409): n is a, c, g, or t
  misc_feature (413)..(413): n is a, c, g, or t
  misc_feature (420)..(420): n is a, c, g, or t
  misc_feature (430)..(430): n is a, c, g, or t
  misc_feature (437)..(437): n is a, c, g, or t
  misc_feature (441)..(441): n is a, c, g, or t
  misc_feature (451)..(451): n is a, c, g, or t
  misc_feature (453)..(455): n is a, c, g, or t
  misc_feature (458)..(461): n is a, c, g, or t
  misc_feature (465)..(466): n is a, c, g, or t

SEQ ID NO: 920 - DNA, 667 bp, Homo sapiens; identical to SEQ ID NO: 406
  misc_feature (282)..(282): n is a, c, g, or t
  misc_feature (311)..(311): n is a, c, g, or t
  misc_feature (325)..(325): n is a, c, g, or t
  misc_feature (349)..(349): n is a, c, g, or t
  misc_feature (360)..(360): n is a, c, g, or t
  misc_feature (363)..(363): n is a, c, g, or t
  misc_feature (404)..(404): n is a, c, g, or t
  misc_feature (466)..(466): n is a, c, g, or t
  misc_feature (478)..(478): n is a, c, g, or t
  misc_feature (510)..(510): n is a, c, g, or t
  misc_feature (518)..(518): n is a, c, g, or t
  misc_feature (527)..(527): n is a, c, g, or t
  misc_feature (529)..(529): n is a, c, g, or t
  misc_feature (531)..(532): n is a, c, g, or t
  misc_feature (536)..(536): n is a, c, g, or t
  misc_feature (542)..(543): n is a, c, g, or t
  misc_feature (550)..(550): n is a, c, g, or t
  misc_feature (555)..(555): n is a, c, g, or t
  misc_feature (557)..(557): n is a, c, g, or t
  misc_feature (564)..(564): n is a, c, g, or t
  misc_feature (568)..(568): n is a, c, g, or t
  misc_feature (578)..(579): n is a, c, g, or t
  misc_feature (585)..(586): n is a, c, g, or t
  misc_feature (590)..(591): n is a, c, g, or t
  misc_feature (593)..(594): n is a, c, g, or t
  misc_feature (597)..(597): n is a, c, g, or t
  misc_feature (601)..(602): n is a, c, g, or t
  misc_feature (609)..(609): n is a, c, g, or t
  misc_feature (617)..(621): n is a, c, g, or t
  misc_feature (624)..(624): n is a, c, g, or t
  misc_feature (633)..(633): n is a, c, g, or t
  misc_feature (636)..(637): n is a, c, g, or t
  misc_feature (639)..(639): n is a, c, g, or t
  misc_feature (643)..(643): n is a, c, g, or t
  misc_feature (647)..(648): n is a, c, g, or t
  misc_feature (653)..(654): n is a, c, g, or t

SEQ ID NO: 921 - DNA, 161 bp, Homo sapiens; identical to SEQ ID NO: 407
  misc_feature (106)..(106): n is a, c, g, or t
  misc_feature (111)..(111): n is a, c, g, or t
  misc_feature (142)..(142): n is a, c, g, or t
  misc_feature (147)..(147): n is a, c, g, or t
  misc_feature (149)..(150): n is a, c, g, or t
  misc_feature (155)..(156): n is a, c, g, or t
  misc_feature (160)..(160): n is a, c, g, or t

SEQ ID NO: 922 - DNA, 443 bp, Homo sapiens; identical to SEQ ID NO: 408
  misc_feature (409)..(409): n is a, c, g, or t

SEQ ID NO: 923 - DNA, 263 bp, Homo sapiens; identical to SEQ ID NO: 409

SEQ ID NO: 924 - DNA, 262 bp, Homo sapiens; identical to SEQ ID NO: 410
  misc_feature (245)..(245): n is a, c, g, or t

SEQ ID NO: 925 - DNA, 431 bp, Homo sapiens; identical to SEQ ID NO: 411
  misc_feature (6)..(7): n is a, c, g, or t
  misc_feature (26)..(26): n is a, c, g, or t
  misc_feature (28)..(28): n is a, c, g, or t
  misc_feature (31)..(31): n is a, c, g, or t
  misc_feature (49)..(49): n is a, c, g, or t
  misc_feature (64)..(65): n is a, c, g, or t
  misc_feature (74)..(74): n is a, c, g, or t
  misc_feature (76)..(76): n is a, c, g, or t
  misc_feature (98)..(98): n is a, c, g, or t
  misc_feature (111)..(111): n is a, c, g, or t
  misc_feature (136)..(136): n is a, c, g, or t
  misc_feature (146)..(146): n is a, c, g, or t
  misc_feature (148)..(148): n is a, c, g, or t
  misc_feature (156)..(156): n is a, c, g, or t
  misc_feature (159)..(159): n is a, c, g, or t
  misc_feature (161)..(161): n is a, c, g, or t
  misc_feature (166)..(166): n is a, c, g, or t
  misc_feature (170)..(171): n is a, c, g, or t
  misc_feature (178)..(178): n is a, c, g, or t
  misc_feature (180)..(181): n is a, c, g, or t
  misc_feature (183)..(183): n is a, c, g, or t
  misc_feature (191)..(191): n is a, c, g, or t
  misc_feature (194)..(194): n is a, c, g, or t
  misc_feature (198)..(198): n is a, c, g, or t
  misc_feature (215)..(215): n is a, c, g, or t
  misc_feature (218)..(218): n is a, c, g, or t
  misc_feature (220)..(220): n is a, c, g, or t
  misc_feature (233)..(233): n is a, c, g, or t
  misc_feature (245)..(245): n is a, c, g, or t
  misc_feature (250)..(251): n is a, c, g, or t
  misc_feature (255)..(256): n is a, c, g, or t
  misc_feature (264)..(264): n is a, c, g, or t
  misc_feature (269)..(270): n is a, c, g, or t
  misc_feature (275)..(275): n is a, c, g, or t
  misc_feature (277)..(277): n is a, c, g, or t
  misc_feature (279)..(279): n is a, c, g, or t
  misc_feature (286)..(287): n is a, c, g, or t
  misc_feature (298)..(298): n is a, c, g, or t
  misc_feature (300)..(300): n is a, c, g, or t
  misc_feature (315)..(315): n is a, c, g, or t
  misc_feature (319)..(319): n is a, c, g, or t
  misc_feature (325)..(325): n is a, c, g, or t
  misc_feature (334)..(335): n is a, c, g, or t
  misc_feature (341)..(341): n is a, c, g, or t
  misc_feature (345)..(345): n is a, c, g, or t
  misc_feature (348)..(348): n is a, c, g, or t
  misc_feature (351)..(356): n is a, c, g, or t
  misc_feature (358)..(358): n is a, c, g, or t
  misc_feature (363)..(363): n is a, c, g, or t
  misc_feature (368)..(368): n is a, c, g, or t
  misc_feature (373)..(373): n is a, c, g, or t
  misc_feature (375)..(375): n is a, c, g, or t
  misc_feature (378)..(378): n is a, c, g, or t
  misc_feature (383)..(383): n is a, c, g, or t
  misc_feature (388)..(388): n is a, c, g, or t
  misc_feature (392)..(393): n is a, c, g, or t
  misc_feature (396)..(396): n is a, c, g, or t
  misc_feature (398)..(401): n is a, c, g, or t
  misc_feature (403)..(403): n is a, c, g, or t
  misc_feature (409)..(409): n is a, c, g, or t
  misc_feature (411)..(411): n is a, c, g, or t
  misc_feature (414)..(416): n is a, c, g, or t
  misc_feature (419)..(420): n is a, c, g, or t

SEQ ID NO: 926 - DNA, 396 bp, Homo sapiens; identical to SEQ ID NO: 412

SEQ ID NO: 927 - DNA, 426 bp, Homo sapiens; identical to SEQ ID NO: 413
  misc_feature (340)..(340): n is a, c, g, or t
  misc_feature (360)..(360): n is a, c, g, or t
  misc_feature (398)..(398): n is a, c, g, or t

SEQ ID NO: 928 - DNA, 517 bp, Homo sapiens; identical to SEQ ID NO: 414
  misc_feature (236)..(236): n is a, c, g, or t
  misc_feature (282)..(282): n is a, c, g, or t
  misc_feature (297)..(297): n is a, c, g, or t
  misc_feature (326)..(326): n is a, c, g, or t
  misc_feature (355)..(355): n is a, c, g, or t
  misc_feature (378)..(378): n is a, c, g, or t
  misc_feature (393)..(393): n is a, c, g, or t
  misc_feature (399)..(399): n is a, c, g, or t
  misc_feature (409)..(410): n is a, c, g, or t
  misc_feature (412)..(412): n is a, c, g, or t
  misc_feature (415)..(415): n is a, c, g, or t
  misc_feature (418)..(418): n is a, c, g, or t
  misc_feature (428)..(428): n is a, c, g, or t
  misc_feature (431)..(433): n is a, c, g, or t
  misc_feature (436)..(436): n is a, c, g, or t
  misc_feature (438)..(438): n is a, c, g, or t
  misc_feature (445)..(446): n is a, c, g, or t
  misc_feature (458)..(458): n is a, c, g, or t
  misc_feature (462)..(464): n is a, c, g, or t
  misc_feature (467)..(467): n is a, c, g, or t
  misc_feature (470)..(471): n is a, c, g, or t
  misc_feature (484)..(484): n is a, c, g, or t
  misc_feature (487)..(487): n is a, c, g, or t
  misc_feature (489)..(489): n is a, c, g, or t
  misc_feature (492)..(492): n is a, c, g, or t
  misc_feature (496)..(496): n is a, c, g, or t
  misc_feature (503)..(503): n is a, c, g, or t
  misc_feature (511)..(511): n is a, c, g, or t
  misc_feature (514)..(514): n is a, c, g, or t

SEQ ID NO: 929 - DNA, 537 bp, Homo sapiens; identical to SEQ ID NO: 415
  misc_feature (307)..(307): n is a, c, g, or t
  misc_feature (322)..(322): n is a, c, g, or t
  misc_feature (327)..(327): n is a, c, g, or t
  misc_feature (341)..(341): n is a, c, g, or t
  misc_feature (378)..(378): n is a, c, g, or t
  misc_feature (428)..(429): n is a, c, g, or t
  misc_feature (431)..(431): n is a, c, g, or t
  misc_feature (433)..(433): n is a, c, g, or t
  misc_feature (435)..(435): n is a, c, g, or t
  misc_feature (438)..(438): n is a, c, g, or t
  misc_feature (457)..(459): n is a, c, g, or t
  misc_feature (476)..(476): n is a, c, g, or t
  misc_feature (489)..(489): n is a, c, g, or t
  misc_feature (497)..(497): n is a, c, g, or t
  misc_feature (500)..(500): n is a, c, g, or t
  misc_feature (504)..(505): n is a, c, g, or t
  misc_feature (510)..(512): n is a, c, g, or t
  misc_feature (519)..(519): n is a, c, g, or t
  misc_feature (522)..(523): n is a, c, g, or t
  misc_feature (526)..(526): n is a, c, g, or t

SEQ ID NO: 930 - DNA, 759 bp, Homo sapiens; identical to SEQ ID NO: 416
  misc_feature (396)..(396): n is a, c, g, or t
  misc_feature (437)..(437): n is a, c, g, or t
  misc_feature (530)..(530): n is a, c, g, or t
  misc_feature (575)..(575): n is a, c, g, or t
  misc_feature (611)..(611): n is a, c, g, or t
  misc_feature (619)..(619): n is a, c, g, or t
  misc_feature (632)..(632): n is a, c, g, or t
  misc_feature (661)..(661): n is a, c, g, or t
  misc_feature (673)..(673): n is a, c, g, or t
  misc_feature (677)..(677): n is a, c, g, or t
  misc_feature (723)..(723): n is a, c, g, or t
  misc_feature (732)..(732): n is a, c, g, or t
  misc_feature (735)..(735): n is a, c, g, or t
  misc_feature (743)..(743): n is a, c, g, or t

SEQ ID NO: 931 - DNA, 595 bp, Homo sapiens; identical to SEQ ID NO: 417
  misc_feature (192)..(192): n is a, c, g, or t
  misc_feature (308)..(308): n is a, c, g, or t
  misc_feature (382)..(383): n is a, c, g, or t
  misc_feature (420)..(421): n is a, c, g, or t
  misc_feature (437)..(437): n is a, c, g, or t
  misc_feature (439)..(439): n is a, c, g, or t
  misc_feature (445)..(445): n is a, c, g, or t
  misc_feature (467)..(467): n is a, c, g, or t
  misc_feature (469)..(470): n is a, c, g, or t
  misc_feature (483)..(483): n is a, c, g, or t
  misc_feature (506)..(506): n is a, c, g, or t
  misc_feature (512)..(513): n is a, c, g, or t
  misc_feature (518)..(519): n is a, c, g, or t
  misc_feature (525)..(525): n is a, c, g, or t
  misc_feature (529)..(529): n is a, c, g, or t
  misc_feature (533)..(533): n is a, c, g, or t
  misc_feature (535)..(536): n is a, c, g, or t
  misc_feature (538)..(538): n is a, c, g, or t
  misc_feature (547)..(547): n is a, c, g, or t
  misc_feature (551)..(551): n is a, c, g, or t
  misc_feature (553)..(553): n is a, c, g, or t
  misc_feature (555)..(555): n is a, c, g, or t
  misc_feature (559)..(560): n is a, c, g, or t
  misc_feature (565)..(567): n is a, c, g, or t
  misc_feature (570)..(570): n is a, c, g, or t
  misc_feature (579)..(579): n is a, c, g, or t
  misc_feature (585)..(585): n is a, c, g, or t

SEQ ID NO: 932 - DNA, 734 bp, Homo sapiens; identical to SEQ ID NO: 418
  misc_feature (543)..(543): n is a, c, g, or t
  misc_feature (608)..(608): n is a, c, g, or t
  misc_feature (610)..(610): n is a, c, g, or t
  misc_feature (620)..(620): n is a, c, g, or t
  misc_feature (656)..(656): n is a, c, g, or t
  misc_feature (676)..(676): n is a, c, g, or t
  misc_feature (679)..(679): n is a, c, g, or t
  misc_feature (692)..(692): n is a, c, g, or t
  misc_feature (698)..(698): n is a, c, g, or t
  misc_feature (716)..(716): n is a, c, g, or t
  misc_feature (726)..(726): n is a, c, g, or t

SEQ ID NO: 933 - DNA, 592 bp, Homo sapiens; identical to SEQ ID NO: 419
  misc_feature (345)..(345): n is a, c, g, or t
  misc_feature (348)..(348): n is a, c, g, or t
  misc_feature (418)..(418): n is a, c, g, or t
  misc_feature (482)..(482): n is a, c, g, or t
  misc_feature (490)..(490): n is a, c, g, or t
  misc_feature (517)..(517): n is a, c, g, or t
  misc_feature (522)..(522): n is a, c, g, or t
  misc_feature (540)..(540): n is a, c, g, or t
  misc_feature (548)..(548): n is a, c, g, or t
  misc_feature (578)..(578): n is a, c, g, or t
  misc_feature (587)..(587): n is a, c, g, or t

SEQ ID NO: 934 - DNA, 650 bp, Homo sapiens; identical to SEQ ID NO: 420
  misc_feature (376)..(376): n is a, c, g, or t
  misc_feature (378)..(378): n is a, c, g, or t
  misc_feature (424)..(424): n is a, c, g, or t
  misc_feature (472)..(472): n is a, c, g, or t
  misc_feature (487)..(487): n is a, c, g, or t
  misc_feature (493)..(493): n is a, c, g, or t
  misc_feature (519)..(519): n is a, c, g, or t
  misc_feature (521)..(521): n is a, c, g, or t
  misc_feature (539)..(541): n is a, c, g, or t
  misc_feature (544)..(544): n is a, c, g, or t
  misc_feature (553)..(553): n is a, c, g, or t
  misc_feature (581)..(581): n is a, c, g, or t
  misc_feature (583)..(583): n is a, c, g, or t
  misc_feature (594)..(594): n is a, c, g, or t
  misc_feature (603)..(603): n is a, c, g, or t
  misc_feature (608)..(608): n is a, c, g, or t
  misc_feature (614)..(615): n is a, c, g, or t
  misc_feature (619)..(619): n is a, c, g, or t
  misc_feature (627)..(627): n is a, c, g, or t
  misc_feature (632)..(632): n is a, c, g, or t
  misc_feature (639)..(640): n is a, c, g, or t

SEQ ID NO: 935 - DNA, 577 bp, Homo sapiens; identical to SEQ ID NO: 421
  misc_feature (317)..(317): n is a, c, g, or t
  misc_feature (365)..(365): n is a, c, g, or t
  misc_feature (415)..(415): n is a, c, g, or t
  misc_feature (445)..(445): n is a, c, g, or t
  misc_feature (467)..(469): n is a, c, g, or t
  misc_feature (472)..(472): n is a, c, g, or t
  misc_feature (474)..(474): n is a, c, g, or t
  misc_feature (488)..(488): n is a, c, g, or t
  misc_feature (494)..(494): n is a, c, g, or t
  misc_feature (497)..(498): n is a, c, g, or t
  misc_feature (502)..(502): n is a, c, g, or t
  misc_feature (522)..(522): n is a, c, g, or t
  misc_feature (527)..(527): n is a, c, g, or t
  misc_feature (534)..(535): n is a, c, g, or t
  misc_feature (544)..(544): n is a, c, g, or t
  misc_feature (549)..(549): n is a, c, g, or t
  misc_feature (551)..(551): n is a, c, g, or t
  misc_feature (555)..(555): n is a, c, g, or t
  misc_feature (557)..(558): n is a, c, g, or t
  misc_feature (574)..(574): n is a, c, g, or t
  misc_feature (576)..(576): n is a, c, g, or t

SEQ ID NO: 936 - DNA, 1154 bp, Homo sapiens; identical to SEQ ID NO: 422
  misc_feature (2)..(3): n is a, c, g, or t
  misc_feature (13)..(13): n is a, c, g, or t
  misc_feature (16)..(16): n is a, c, g, or t
  misc_feature (19)..(20): n is a, c, g, or t
  misc_feature (22)..(22): n is a, c, g, or t
  misc_feature (744)..(744): n is a, c, g, or t
  misc_feature (760)..(760): n is a, c, g, or t
  misc_feature (765)..(765): n is a, c, g, or t
  misc_feature (767)..(767): n is a, c, g, or t
  misc_feature (800)..(800): n is a, c, g, or t
  misc_feature (814)..(814): n is a, c, g, or t
  misc_feature (830)..(830): n is a, c, g, or t
  misc_feature (835)..(835): n is a, c, g, or t
  misc_feature (856)..(856): n is a, c, g, or t
  misc_feature (894)..(894): n is a, c, g, or t
  misc_feature (909)..(909): n is a, c, g, or t
  misc_feature (923)..(923): n is a, c, g, or t
  misc_feature (926)..(926): n is a, c, g, or t
  misc_feature (935)..(935): n is a, c, g, or t
  misc_feature (942)..(942): n is a, c, g, or t
  misc_feature (945)..(945): n is a, c, g, or t
  misc_feature (982)..(982): n is a, c, g, or t
  misc_feature (985)..(985): n is a, c, g, or t
  misc_feature (999)..(999): n is a, c, g, or t
  misc_feature (1002)..(1002): n is a, c, g, or t
  misc_feature (1008)..(1008): n is a, c, g, or t
  misc_feature (1011)..(1011): n is a, c, g, or t
  misc_feature (1017)..(1017): n is a, c, g, or t
  misc_feature (1019)..(1019): n is a, c, g, or t
  misc_feature (1051)..(1051): n is a, c, g, or t
  misc_feature (1058)..(1058): n is a, c, g, or t
  misc_feature (1061)..(1061): n is a, c, g, or t
  misc_feature (1070)..(1071): n is a, c, g, or t
  misc_feature (1081)..(1081): n is a, c, g, or t
  misc_feature (1085)..(1085): n is a, c, g, or t
  misc_feature (1091)..(1091): n is a, c, g, or t
  misc_feature (1098)..(1099): n is a, c, g, or t
  misc_feature (1101)..(1103): n is a, c, g, or t
  misc_feature (1116)..(1116): n is a, c, g, or t
  misc_feature (1118)..(1119): n is a, c, g, or t
  misc_feature (1124)..(1124): n is a, c, g, or t
  misc_feature (1126)..(1126): n is a, c, g, or t
  misc_feature (1134)..(1134): n is a, c, g, or t
  misc_feature (1145)..(1146): n is a, c, g, or t

SEQ ID NO: 937 - DNA, 861 bp, Homo sapiens; identical to SEQ ID NO: 423
  misc_feature (539)..(539): n is a, c, g, or t
  misc_feature (549)..(549): n is a, c, g, or t
  misc_feature (573)..(573): n is a, c, g, or t
  misc_feature (617)..(617): n is a, c, g, or t
  misc_feature (636)..(636): n is a, c, g, or t
  misc_feature (650)..(651): n is a, c, g, or t
  misc_feature (665)..(665): n is a, c, g, or t
  misc_feature (674)..(674): n is a, c, g, or t
  misc_feature (679)..(679): n is a, c, g, or t
  misc_feature (688)..(688): n is a, c, g, or t
  misc_feature (691)..(691): n is a, c, g, or t
  misc_feature (697)..(697): n is a, c, g, or t
  misc_feature (714)..(714): n is a, c, g, or t
  misc_feature (717)..(717): n is a, c, g, or t
  misc_feature (749)..(750): n is a, c, g, or t
  misc_feature (761)..(762): n is a, c, g, or t
  misc_feature (768)..(769): n is a, c, g, or t
  misc_feature (777)..(777): n is a, c, g, or t
  misc_feature (780)..(780): n is a, c, g, or t
  misc_feature (792)..(792): n is a, c, g, or t
  misc_feature (797)..(800): n is a, c, g, or t
  misc_feature (809)..(809): n is a, c, g, or t
  misc_feature (816)..(816): n is a, c, g, or t
  misc_feature (823)..(824): n is a, c, g, or t
  misc_feature (843)..(843): n is a, c, g, or t
  misc_feature (845)..(845): n is a, c, g, or t
  misc_feature (851)..(851): n is a, c, g, or t
  misc_feature (855)..(855): n is a, c, g, or t
  misc_feature (858)..(858): n is a, c, g, or t

SEQ ID NO: 938 - DNA, 442 bp, Homo sapiens; identical to SEQ ID NO: 424

SEQ ID NO: 939 - DNA, 529 bp, Homo sapiens; identical to SEQ ID NO: 425

SEQ ID NO: 940 - DNA, 701 bp, Homo sapiens; identical to SEQ ID NO: 426
  misc_feature (665)..(665): n is a, c, g, or t

SEQ ID NO: 941 - DNA, 375 bp, Homo sapiens; identical to SEQ ID NO: 353

SEQ ID NO: 942 - DNA, 882 bp, Homo sapiens; identical to SEQ ID NO: 428
  misc_feature (512)..(512): n is a, c, g, or t
  misc_feature (559)..(559): n is a, c, g, or t
  misc_feature (591)..(591): n is a, c, g, or t
  misc_feature (620)..(620): n is a, c, g, or t
  misc_feature (635)..(635): n is a, c, g, or t
  misc_feature (656)..(656): n is a, c, g, or t
  misc_feature (659)..(659): n is a, c, g, or t
  misc_feature (673)..(673): n is a, c, g, or t
  misc_feature (681)..(681): n is a, c, g, or t
  misc_feature (703)..(703): n is a, c, g, or t
  misc_feature (714)..(714): n is a, c, g, or t
  misc_feature (720)..(720): n is a, c, g, or t
  misc_feature (734)..(734): n is a, c, g, or t
  misc_feature (759)..(759): n is a, c, g, or t
  misc_feature (772)..(772): n is a, c, g, or t
  misc_feature (774)..(774): n is a, c, g, or t
  misc_feature (776)..(776): n is a, c, g, or t
  misc_feature (788)..(788): n is a, c, g, or t
  misc_feature (790)..(790): n is a, c, g, or t
  misc_feature (795)..(795): n is a, c, g, or t
  misc_feature (802)..(802): n is a, c, g, or t
  misc_feature (805)..(807): n is a, c, g, or t
  misc_feature (809)..(809): n is a, c, g, or t
  misc_feature (811)..(811): n is a, c, g, or t
  misc_feature (814)..(814): n is a, c, g, or t
  misc_feature (825)..(825): n is a, c, g, or t
  misc_feature (863)..(863): n is a, c, g, or t
  misc_feature (881)..(881): n is a, c, g, or t

SEQ ID NO: 943 - DNA, 858 bp, Homo sapiens; identical to SEQ ID NO: 429
  misc_feature (549)..(549): n is a, c, g, or t
  misc_feature (569)..(569): n is a, c, g, or t
  misc_feature (688)..(688): n is a, c, g, or t
  misc_feature (719)..(719): n is a, c, g, or t
  misc_feature (771)..(771): n is a, c, g, or t
  misc_feature (776)..(776): n is a, c, g, or t
  misc_feature (788)..(788): n is a, c, g, or t
  misc_feature (797)..(797): n is a, c, g, or t
  misc_feature (800)..(800): n is a, c, g, or t
  misc_feature (822)..(823): n is a, c, g, or t

SEQ ID NO: 944 - DNA, 836 bp, Homo sapiens; identical to SEQ ID NO: 430
  misc_feature (406)..(406): n is a, c, g, or t
  misc_feature (487)..(487): n is a, c, g, or t
  misc_feature (503)..(503): n is a, c, g, or t
  misc_feature (563)..(563): n is a, c, g, or t
  misc_feature (575)..(575): n is a, c, g, or t
  misc_feature (607)..(607): n is a, c, g, or t
  misc_feature (619)..(619): n is a, c, g, or t
  misc_feature (633)..(633): n is a, c, g, or t
  misc_feature (663)..(663): n is a, c, g, or t
  misc_feature (667)..(667): n is a, c, g, or t
  misc_feature (671)..(671): n is a, c, g, or t
  misc_feature (684)..(684): n is a, c, g, or t
  misc_feature (688)..(688): n is a, c, g, or t
  misc_feature (697)..(697): n is a, c, g, or t
  misc_feature (727)..(727): n is a, c, g, or t
  misc_feature (731)..(731): n is a, c, g, or t
  misc_feature (740)..(743): n is a, c, g, or t
  misc_feature (751)..(751): n is a, c, g, or t
  misc_feature (763)..(763): n is a, c, g, or t
  misc_feature (768)..(770): n is a, c, g, or t
  misc_feature (773)..(773): n is a, c, g, or t
  misc_feature (779)..(779): n is a, c, g, or t
  misc_feature (782)..(782): n is a, c, g, or t
  misc_feature (784)..(784): n is a, c, g, or t
  misc_feature (790)..(790): n is a, c, g, or t
  misc_feature (796)..(796): n is a, c, g, or t
  misc_feature (799)..(799): n is a, c, g, or t
  misc_feature (803)..(803): n is a, c, g, or t
  misc_feature (806)..(806): n is a, c, g, or t
  misc_feature (824)..(824): n is a, c, g, or t
  misc_feature (828)..(828): n is a, c, g, or t
  misc_feature (834)..(835): n is a, c, g, or t

SEQ ID NO: 945 - DNA, 856 bp, Homo sapiens; identical to SEQ ID NO: 431
  misc_feature (473)..(473): n is a, c, g, or t
  misc_feature (573)..(573): n is a, c, g, or t
  misc_feature (616)..(616): n is a, c, g, or t
  misc_feature (619)..(619): n is a, c, g, or t
  misc_feature (622)..(622): n is a, c, g, or t
  misc_feature (656)..(656): n is a, c, g, or t
  misc_feature (658)..(658): n is a, c, g, or t
  misc_feature (665)..(665): n is a, c, g, or t
  misc_feature (668)..(668): n is a, c, g, or t
  misc_feature (671)..(671): n is a, c, g, or t
  misc_feature (677)..(677): n is a, c, g, or t
  misc_feature (693)..(693): n is a, c, g, or t
  misc_feature (729)..(729): n is a, c, g, or t
  misc_feature (740)..(740): n is a, c, g, or t
  misc_feature (751)..(751): n is a, c, g, or t
  misc_feature (754)..(754): n is a, c, g, or t
  misc_feature (758)..(759): n is a, c, g, or t
  misc_feature (763)..(763): n is a, c, g, or t
  misc_feature (801)..(801): n is a, c, g, or t
  misc_feature (815)..(815): n is a, c, g, or t
  misc_feature (824)..(824): n is a, c, g, or t
  misc_feature (829)..(829): n is a, c, g, or t
  misc_feature (840)..(840): n is a, c, g, or t
  misc_feature (849)..(849): n is a, c, g, or t

SEQ ID NO: 946 - DNA, 828 bp, Homo sapiens; identical to SEQ ID NO: 432
  misc_feature (483)..(483): n is a, c, g, or t
  misc_feature (535)..(535): n is a, c, g, or t
  misc_feature (585)..(585): n is a, c, g, or t
  misc_feature (595)..(595): n is a, c, g, or t
  misc_feature (630)..(630): n is a, c, g, or t
  misc_feature (636)..(636): n is a, c, g, or t
  misc_feature (640)..(640): n is a, c, g, or t
  misc_feature (681)..(681): n is a, c, g, or t
  misc_feature (689)..(689): n is a, c, g, or t
  misc_feature (694)..(694): n is a, c, g, or t
  misc_feature (711)..(711): n is a, c, g, or t
  misc_feature (789)..(789): n is a, c, g, or t

SEQ ID NO: 947 - DNA, 414 bp, Homo sapiens; identical to SEQ ID NO: 433
  misc_feature (250)..(250): n is a, c, g, or t
  misc_feature (262)..(262): n is a, c, g, or t
  misc_feature (266)..(267): n is a, c, g, or t
  misc_feature (270)..(270): n is a, c, g, or t
  misc_feature (272)..(272): n is a, c, g, or t
  misc_feature (275)..(275): n is a, c, g, or t
  misc_feature (284)..(284): n is a, c, g, or t
  misc_feature (298)..(298): n is a, c, g, or t
  misc_feature (300)..(300): n is a, c, g, or t
  misc_feature (303)..(303): n is a, c, g, or t
  misc_feature (309)..(309): n is a, c, g, or t
  misc_feature (322)..(322): n is a, c, g, or t
  misc_feature (326)..(326): n is a, c, g, or t
  misc_feature (344)..(345): n is a, c, g, or t
  misc_feature (370)..(370): n is a, c, g, or t
  misc_feature (373)..(373): n is a, c, g, or t
  misc_feature (377)..(377): n is a, c, g, or t
  misc_feature (391)..(391): n is a, c, g, or t
  misc_feature (400)..(401): n is a, c, g, or t
  misc_feature (407)..(407): n is a, c, g, or t
  misc_feature (410)..(410): n is a, c, g, or t

SEQ ID NO: 948 - DNA, 866 bp, Homo sapiens; identical to SEQ ID NO: 434
  misc_feature (509)..(509): n is a, c, g, or t
  misc_feature (550)..(550): n is a, c, g, or t
  misc_feature (553)..(553): n is a, c, g, or t
  misc_feature (650)..(650): n is a, c, g, or t
  misc_feature (666)..(666): n is a, c, g, or t
  misc_feature (677)..(677): n is a, c, g, or t
  misc_feature (684)..(684): n is a, c, g, or t
  misc_feature (693)..(694): n is a, c, g, or t
  misc_feature (700)..(700): n is a, c, g, or t
  misc_feature (720)..(720): n is a, c, g, or t
  misc_feature (724)..(724): n is a, c, g, or t
  misc_feature (729)..(729): n is a, c, g, or t
  misc_feature (732)..(732): n is a, c, g, or t
  misc_feature (745)..(746): n is a, c, g, or t
  misc_feature (752)..(753): n is a, c, g, or t
  misc_feature (767)..(767): n is a, c, g, or t
  misc_feature (774)..(774): n is a, c, g, or t
  misc_feature (776)..(776): n is a, c, g, or t
  misc_feature (791)..(791): n is a, c, g, or t
  misc_feature (820)..(820): n is a, c, g, or t
  misc_feature (845)..(845): n is a, c, g, or t
  misc_feature (847)..(847): n is a, c, g, or t
  misc_feature (860)..(861): n is a, c, g, or t
  misc_feature (864)..(864): n is a, c, g, or t
  misc_feature (866)..(866): n is a, c, g, or t

SEQ ID NO: 949 - DNA, 829 bp, Homo sapiens; identical to SEQ ID NO: 435
  misc_feature (476)..(476): n is a, c, g, or t
  misc_feature (522)..(522): n is a, c, g, or t
  misc_feature (530)..(530): n is a, c, g, or t
  misc_feature (544)..(544): n is a, c, g, or t
  misc_feature (562)..(562): n is a, c, g, or t
  misc_feature (664)..(664): n is a, c, g, or t
  misc_feature (679)..(679): n is a, c, g, or t
  misc_feature (743)..(743): n is a, c, g, or t
  misc_feature (757)..(757): n is a, c, g, or t
  misc_feature (767)..(767): n is a, c, g, or t
  misc_feature (780)..(780): n is a, c, g, or t
  misc_feature (785)..(785): n is a, c, g, or t
  misc_feature (803)..(803): n is a, c, g, or t
  misc_feature (805)..(805): n is a, c, g, or t
  misc_feature (811)..(813): n is a, c, g, or t
  misc_feature (815)..(815): n is a, c, g, or t

SEQ ID NO: 950 - DNA, 840 bp, Homo sapiens; identical to SEQ ID NO: 436
  misc_feature (539)..(539): n is a, c, g, or t
  misc_feature (542)..(542): n is a, c, g, or t
  misc_feature (549)..(549): n is a, c, g, or t
  misc_feature (559)..(559): n is a, c, g, or t
  misc_feature (599)..(599): n is a, c, g, or t
  misc_feature (738)..(738): n is a, c, g, or t
  misc_feature (766)..(766): n is a, c, g, or t
  misc_feature (781)..(781): n is a, c, g, or t
  misc_feature (784)..(784): n is a, c, g, or t
  misc_feature (794)..(794): n is a, c, g, or t
  misc_feature (798)..(798): n is a, c, g, or t
  misc_feature (805)..(805): n is a, c, g, or t
  misc_feature (816)..(817): n is a, c, g, or t
  misc_feature (824)..(824): n is a, c, g, or t
  misc_feature (831)..(831): n is a, c, g, or t

SEQ ID NO: 951 - DNA, 838 bp, Homo sapiens; identical to SEQ ID NO: 437
  misc_feature (591)..(591): n is a, c, g, or t
  misc_feature (628)..(628): n is a, c, g, or t
  misc_feature (688)..(688): n is a, c, g, or t
  misc_feature (696)..(696): n is a, c, g, or t
  misc_feature (736)..(736): n is a, c, g, or t
  misc_feature (738)..(738): n is a, c, g, or t
  misc_feature (743)..(743): n is a, c, g, or t
  misc_feature (746)..(746): n is a, c, g, or t
  misc_feature (751)..(751): n is a, c, g, or t
  misc_feature (766)..(766): n is a, c, g, or t
  misc_feature (773)..(773): n is a, c, g, or t
  misc_feature (813)..(813): n is a, c, g, or t
  misc_feature (819)..(819): n is a, c, g, or t
  misc_feature (827)..(828): n is a, c, g, or t
  misc_feature (836)..(836): n is a, c, g, or t

SEQ ID NO: 952 - DNA, 850 bp, Homo sapiens; identical to SEQ ID NO: 438
  misc_feature (387)..(387): n is a, c, g, or t
  misc_feature (477)..(477): n is a, c, g, or t
  misc_feature (512)..(512): n is a, c, g, or t
  misc_feature (540)..(540): n is a, c, g, or t
  misc_feature (611)..(611): n is a, c, g, or t
  misc_feature (653)..(653): n is a, c, g, or t
  misc_feature (655)..(655): n is a, c, g, or t
  misc_feature (669)..(669): n is a, c, g, or t
  misc_feature (678)..(678): n is a, c, g, or t
  misc_feature (689)..(689): n is a, c, g, or t
  misc_feature (704)..(704): n is a, c, g, or t
  misc_feature (709)..(709): n is a, c, g, or t
  misc_feature (714)..(714): n is a, c, g, or t
  misc_feature (760)..(760): n is a, c, g, or t
  misc_feature (774)..(774): n is a, c, g, or t
  misc_feature (776)..(776): n is a, c, g, or t
  misc_feature (783)..(783): n is a, c, g, or t
  misc_feature (793)..(793): n is a, c, g, or t
  misc_feature (801)..(801): n is a, c, g, or t
  misc_feature (806)..(806): n is a, c, g, or t
  misc_feature (808)..(808): n is a, c, g, or t
  misc_feature (813)..(813): n is a, c, g, or t

SEQ ID NO: 953 - DNA, 483 bp, Homo sapiens; identical to SEQ ID NO: 439

SEQ ID NO: 954 - DNA, 449 bp, Homo sapiens; identical to SEQ ID NO: 440

SEQ ID NO: 955 - DNA, 450 bp, Homo sapiens; identical to SEQ ID NO: 441

SEQ ID NO: 956 - DNA, 517 bp, Homo sapiens; identical to SEQ ID NO: 442
  misc_feature (110)..(110): n is a, c, g, or t
  misc_feature (169)..(169): n is a, c, g, or t
  misc_feature (265)..(265): n is a, c, g, or t
  misc_feature (300)..(300): n is a, c, g, or t
  misc_feature (509)..(509): n is a, c, g, or t
  misc_feature (516)..(516): n is a, c, g, or t

SEQ ID NO: 957 - DNA, 519 bp, Homo sapiens; identical to SEQ ID NO: 443
  misc_feature (511)..(511): n is a, c, g, or t

SEQ ID NO: 958 - DNA, 873 bp, Homo sapiens; identical to SEQ ID NO: 444
  misc_feature (553)..(553): n is a, c, g, or t
  misc_feature (562)..(562): n is a, c, g, or t
  misc_feature (616)..(616): n is a, c, g, or t
  misc_feature (644)..(644): n is a, c, g, or t
  misc_feature (659)..(659): n is a, c, g, or t
  misc_feature (663)..(663): n is a, c, g, or t
  misc_feature (693)..(693): n is a, c, g, or t
  misc_feature (708)..(708): n is a, c, g, or t
  misc_feature (723)..(723): n is a, c, g, or t
  misc_feature (788)..(788): n is a, c, g, or t
  misc_feature (790)..(790): n is a, c, g, or t
  misc_feature (795)..(795): n is a, c, g, or t
  misc_feature (797)..(797): n is a, c, g, or t
  misc_feature (799)..(799): n is a, c, g, or t
  misc_feature (822)..(822): n is a, c, g, or t
  misc_feature (843)..(843): n is a, c, g, or t
  misc_feature (862)..(862): n is a, c, g, or t
  misc_feature (872)..(872): n is a, c, g, or t

SEQ ID NO: 959 - DNA, 832 bp, Homo sapiens; identical to SEQ ID NO: 445
  misc_feature (220)..(220): n is a, c, g, or t
  misc_feature (416)..(416): n is a, c, g, or t
  misc_feature (424)..(424): n is a, c, g, or t
  misc_feature (458)..(458): n is a, c, g, or t
  misc_feature (525)..(525): n is a, c, g, or t
  misc_feature (545)..(545): n is a, c, g, or t
  misc_feature (586)..(586): n is a, c, g, or t
  misc_feature (638)..(638): n is a, c, g, or t
  misc_feature (664)..(664): n is a, c, g, or t
  misc_feature (670)..(671): n is a, c, g, or t
  misc_feature (687)..(687): n is a, c, g, or t
  misc_feature (690)..(690): n is a, c, g, or t
  misc_feature (703)..(703): n is a, c, g, or t
  misc_feature (727)..(727): n is a, c, g, or t
  misc_feature (732)..(732): n is a, c, g, or t
  misc_feature (771)..(771): n is a, c, g, or t
  misc_feature (773)..(773): n is a, c, g, or t
  misc_feature (776)..(776): n is a, c, g, or t
  misc_feature (781)..(781): n is a, c, g, or t
  misc_feature (797)..(797): n is a, c, g, or t
  misc_feature (799)..(799): n is a, c, g, or t
  misc_feature (804)..(804): n is a, c, g, or t
  misc_feature (807)..(807): n is a, c, g, or t
  misc_feature (823)..(823): n is a, c, g, or t
  misc_feature (828)..(828): n is a, c, g, or t

SEQ ID NO: 960 - DNA, 436 bp, Homo sapiens; identical to SEQ ID NO: 446

SEQ ID NO: 961 - DNA, 944 bp, Homo sapiens; identical to SEQ ID NO: 447
  misc_feature (535)..(535): n is a, c, g, or t
  misc_feature (561)..(561): n is a, c, g, or t
  misc_feature (599)..(599): n is a, c, g, or t
  misc_feature (615)..(615): n is a, c, g, or t
  misc_feature (621)..(621): n is a, c, g, or t
  misc_feature (627)..(627): n is a, c, g, or t
  misc_feature (673)..(673): n is a, c, g, or t
  misc_feature (685)..(685): n is a, c, g, or t
  misc_feature (748)..(748): n is a, c, g, or t
  misc_feature (751)..(751): n is a, c, g, or t
  misc_feature (761)..(761): n is a, c, g, or t
  misc_feature (763)..(764): n is a, c, g, or t
  misc_feature (769)..(769): n is a, c, g, or t
  misc_feature (773)..(774): n is a, c, g, or t
  misc_feature (779)..(779): n is a, c, g, or t
  misc_feature (796)..(797): n is a, c, g, or t
  misc_feature (801)..(801): n is a, c, g, or t
  misc_feature (812)..(812): n is a, c, g, or t
  misc_feature (819)..(819): n is a, c, g, or t
  misc_feature (821)..(821): n is a, c, g, or t
  misc_feature (824)..(824): n is a, c, g, or t
  misc_feature (831)..(831): n is a, c, g, or t
  misc_feature (836)..(837): n is a, c, g, or t
  misc_feature (849)..(849): n is a, c, g, or t
  misc_feature (860)..(860): n is a, c, g, or t
  misc_feature (868)..(868): n is a, c, g, or t
  misc_feature (878)..(878): n is a, c, g, or t
  misc_feature (886)..(886): n is a, c, g, or t
  misc_feature (904)..(904): n is a, c, g, or t
  misc_feature (906)..(906): n is a, c, g, or t
  misc_feature (915)..(915): n is a, c, g, or t
  misc_feature (918)..(918): n is a, c, g, or t
  misc_feature (920)..(920): n is a, c, g, or t
  misc_feature (925)..(925): n is a, c, g, or t
  misc_feature (931)..(931): n is a, c, g, or t
  misc_feature (936)..(936): n is a, c, g, or t
  misc_feature (938)..(938): n is a, c, g, or t
  misc_feature (942)..(942): n is a, c, g, or t

SEQ ID NO: 962 - DNA, 568 bp, Homo sapiens; identical to SEQ ID NO: 448
  misc_feature (439)..(439): n is a, c, g, or t
  misc_feature (448)..(448): n is a, c, g, or t
  misc_feature (480)..(480): n is a, c, g, or t
  misc_feature (488)..(488): n is a, c, g, or t
  misc_feature (496)..(496): n is a, c, g, or t
  misc_feature (504)..(504): n is a, c, g, or t
  misc_feature (506)..(506): n is a, c, g, or t
  misc_feature (509)..(510): n is a, c, g, or t
  misc_feature (520)..(520): n is a, c, g, or t
  misc_feature (523)..(523): n is a, c, g, or t
  misc_feature (527)..(527): n is a, c, g, or t
  misc_feature (532)..(532): n is a, c, g, or t
  misc_feature (540)..(540): n is a, c, g, or t
  misc_feature (562)..(562): n is a, c, g, or t
  misc_feature (566)..(566): n is a, c, g, or t

SEQ ID NO: 963 - DNA, 256 bp, Homo sapiens; identical to SEQ ID NO: 449
  misc_feature (7)..(8): n is a, c, g, or t
  misc_feature (13)..(13): n is a, c, g, or t
  misc_feature (19)..(19): n is a, c, g, or t
  misc_feature (21)..(21): n is a, c, g, or t
  misc_feature (41)..(41): n is a, c, g, or t
  misc_feature (45)..(45): n is a, c, g, or t
  misc_feature (47)..(47): n is a, c, g, or t
  misc_feature (49)..(50): n is a, c, g, or t
  misc_feature (52)..(52): n is a, c, g, or t
  misc_feature (57)..(57): n is a, c, g, or t
  misc_feature (77)..(77): n is a, c, g, or t
  misc_feature (82)..(82): n is a, c, g, or t
  misc_feature (96)..(96): n is a, c, g, or t
  misc_feature (103)..(104): n is a, c, g, or t
  misc_feature (108)..(108): n is a, c, g, or t
  misc_feature (111)..(111): n is a, c, g, or t
  misc_feature (126)..(126): n is a, c, g, or t
  misc_feature (144)..(144): n is a, c, g, or t
  misc_feature (161)..(161): n is a, c, g, or t
  misc_feature (170)..(170): n is a, c, g, or t
  misc_feature (185)..(185): n is a, c, g, or t
  misc_feature (191)..(191): n is a, c, g, or t
  misc_feature (199)..(199): n is a, c, g, or t
  misc_feature (205)..(205): n is a, c, g, or t
  misc_feature (239)..(239): n is a, c, g, or t
  misc_feature (254)..(254): n is a, c, g, or t

SEQ ID NO: 964 - DNA, 369 bp, Homo sapiens; identical to SEQ ID NO: 450

SEQ ID NO: 965 - DNA, 810 bp, Homo sapiens; identical to SEQ ID NO: 451
  misc_feature (535)..(535): n is a, c, g, or t
  misc_feature (633)..(633): n is a, c, g, or t
  misc_feature (656)..(656): n is a, c, g, or t
  misc_feature (712)..(712): n is a, c, g, or t
  misc_feature (732)..(732): n is a, c, g, or t
  misc_feature (739)..(739): n is a, c, g, or t
  misc_feature (748)..(748): n is a, c, g, or t
  misc_feature (750)..(750): n is a, c, g, or t
  misc_feature (790)..(790): n is a, c, g, or t
  misc_feature (801)..(801): n is a, c, g, or t

SEQ ID NO: 966 - DNA, 288 bp, Homo sapiens; identical to SEQ ID NO: 452

SEQ ID NO: 967 - DNA, 735 bp, Homo sapiens; identical to SEQ ID NO: 453
  misc_feature (477)..(477): n is a, c, g, or t
  misc_feature (558)..(558): n is a, c, g, or t
  misc_feature (588)..(588): n is a, c, g, or t
  misc_feature (632)..(633): n is a, c, g, or t
  misc_feature (641)..(641): n is a, c, g, or t
  misc_feature (654)..(654): n is a, c, g, or t
  misc_feature (665)..(666): n is a, c, g, or t
  misc_feature (670)..(670): n is a, c, g, or t
  misc_feature (680)..(681): n is a, c, g, or t
  misc_feature (684)..(684): n is a, c, g, or t
  misc_feature (702)..(702): n is a, c, g, or t
  misc_feature (706)..(706): n is a, c, g, or t
  misc_feature (714)..(714): n is a, c, g, or t
  misc_feature (719)..(719): n is a, c, g, or t
  misc_feature (723)..(723): n is a, c, g, or t
  misc_feature (726)..(726): n is a, c, g, or t

SEQ ID NO: 968 - DNA, 1002 bp, Homo sapiens; identical to SEQ ID NO: 454
  misc_feature (510)..(510): n is a, c, g, or t
  misc_feature (616)..(616): n is a, c, g, or t
  misc_feature (620)..(620): n is a, c, g, or t
  misc_feature (634)..(634): n is a, c, g, or t
  misc_feature (646)..(646): n is a, c, g, or t
  misc_feature (657)..(657): n is a, c, g, or t
  misc_feature (665)..(665): n is a, c, g, or t
  misc_feature (668)..(668): n is a, c, g, or t
  misc_feature (755)..(755): n is a, c, g, or t
  misc_feature (757)..(757): n is a, c, g, or t
  misc_feature (784)..(785): n is a, c, g, or t
  misc_feature (804)..(804): n is a, c, g, or t
  misc_feature (809)..(809): n is a, c, g, or t
  misc_feature (814)..(814): n is a, c, g, or t
  misc_feature (816)..(816): n is a, c, g, or t
  misc_feature (818)..(819): n is a, c, g, or t
  misc_feature (824)..(824): n is a, c, g, or t
  misc_feature (831)..(831): n is a, c, g, or t
  misc_feature (837)..(837): n is a, c, g, or t
  misc_feature (839)..(839): n is a, c, g, or t
  misc_feature (844)..(844): n is a, c, g, or t
  misc_feature (859)..(859): n is a, c, g, or t
  misc_feature (881)..(881): n is a, c, g, or t
  misc_feature (887)..(888): n is a, c, g, or t
  misc_feature (890)..(890): n is a, c, g, or t
  misc_feature (894)..(896): n is a, c, g, or t
  misc_feature (900)..(900): n is a, c, g, or t
  misc_feature (913)..(913): n is a, c, g, or t
  misc_feature (923)..(923): n is a, c, g, or t
  misc_feature (926)..(926): n is a, c, g, or t
  misc_feature (932)..(932): n is a, c, g, or t
  misc_feature (935)..(935): n is a, c, g, or t
  misc_feature (945)..(945): n is a, c, g, or t
  misc_feature (957)..(958): n is a, c, g, or t
  misc_feature (960)..(960): n is a, c, g, or t
  misc_feature (976)..(976): n is a, c, g, or t
  misc_feature (982)..(983): n is a, c, g, or t
  misc_feature (988)..(988): n is a, c, g, or t
  misc_feature (994)..(994): n is a, c, g, or t

SEQ ID NO: 969 - DNA, 447 bp, Homo sapiens; identical to SEQ ID NO: 455

SEQ ID NO: 970 - DNA, 925 bp, Homo sapiens; identical to SEQ ID NO: 456
  misc_feature (511)..(511): n is a, c, g, or t
  misc_feature (521)..(521): n is a, c, g, or t
  misc_feature (523)..(523): n is a, c, g, or t
  misc_feature (545)..(545): n is a, c, g, or t
  misc_feature (563)..(563): n is a, c, g, or t
  misc_feature (585)..(585): n is a, c, g, or t
  misc_feature (591)..(591): n is a, c, g, or t
  misc_feature (593)..(593): n is a, c, g, or t
  misc_feature (609)..(609): n is a, c, g, or t
  misc_feature (636)..(636): n is a, c, g, or t
  misc_feature (642)..(642): n is a, c, g, or t
  misc_feature (656)..(656): n is a, c, g, or t
  misc_feature (664)..(664): n is a, c, g, or t
  misc_feature (673)..(673): n is a, c, g, or t
  misc_feature (702)..(702): n is a, c, g, or t
  misc_feature (721)..(721): n is a, c, g, or t
  misc_feature (732)..(732): n is a, c, g, or t
  misc_feature (738)..(738): n is a, c, g, or t
  misc_feature (743)..(743): n is a, c, g, or t
  misc_feature (746)..(746): n is a, c, g, or t
  misc_feature (764)..(765): n is a, c, g, or t
  misc_feature (775)..(776): n is a, c, g, or t
  misc_feature (781)..(781): n is a, c, g, or t
  misc_feature (803)..(803): n is a, c, g, or t
  misc_feature (825)..(825): n is a, c, g, or t
  misc_feature (833)..(833): n is a, c, g, or t
  misc_feature (845)..(845): n is a, c, g, or t
  misc_feature (856)..(856): n is a, c, g, or t
  misc_feature (858)..(858): n is a, c, g, or t
  misc_feature (861)..(861): n is a, c, g, or t
  misc_feature (868)..(868): n is a, c, g, or t
  misc_feature (873)..(874): n is a, c, g, or t
  misc_feature (881)..(881): n is a, c, g, or t
  misc_feature (883)..(883): n is a, c, g, or t
  misc_feature (893)..(893): n is a, c, g, or t
  misc_feature (898)..(898): n is a, c, g, or t
  misc_feature (902)..(903): n is a, c, g, or t

SEQ ID NO: 971 - DNA, 589 bp, Homo sapiens
  misc_feature (442)..(442): n is a, c, g, or t
  misc_feature (530)..(530): n is a, c, g, or t
  misc_feature (543)..(543): n is a, c, g, or t
  misc_feature (561)..(561): n is a, c, g, or t
aagggaaagatgaaaaattataaccaagcataatatagcaaggactaacccctataccttctgcataatgaattaactagaaataactttgcaaggagagccaaagctaagacccccgaaaccagacgagctacctaagaacagctaaaagagcacacccgtctatgtagcaaaatagtgggaagatttataggtagaggcgacaaacctaccgagcctggtgatagctggttgtccaagatagaatcttagttcaactttaaatttgcccacagaaccctctaaatccccttgtaaatttaactgttagtccaaagaggaacagctctttggacactaggaaaaaaccttgtagagagagtaaaaaatttaccgccgatactgacgggctccaggagtcgtcgccaccaatcccaagggcgaattccagcacactggcggncgttactagtggatccgactcggtaccaagcttgatgcatagcttgagtattctatagtgcacctaaatagcttggcgtaatcatggncatactgttctgngtgaaaatggtatccgtnacaatttcacacacatacgagccggagc

SEQ ID NO: 972 - DNA, 516 bp, Homo sapiens; identical to SEQ ID NO: 457
  misc_feature (327)..(327): n is a, c, g, or t

SEQ ID NO: 973 - DNA, 965 bp, Homo sapiens; identical to SEQ ID NO: 458
  misc_feature (528)..(528): n is a, c, g, or t
  misc_feature (560)..(560): n is a, c, g, or t
  misc_feature (586)..(586): n is a, c, g, or t
  misc_feature (600)..(600): n is a, c, g, or t
  misc_feature (653)..(653): n is a, c, g, or t
  misc_feature (675)..(675): n is a, c, g, or t
  misc_feature (680)..(681): n is a, c, g, or t
  misc_feature (684)..(684): n is a, c, g, or t
  misc_feature (699)..(699): n is a, c, g, or t
  misc_feature (703)..(703): n is a, c, g, or t
  misc_feature (722)..(722): n is a, c, g, or t
  misc_feature (734)..(734): n is a, c, g, or t
  misc_feature (741)..(741): n is a, c, g, or t
  misc_feature (747)..(747): n is a, c, g, or t
  misc_feature (752)..(752): n is a, c, g, or t
  misc_feature (755)..(755): n is a, c, g, or t
  misc_feature (764)..(764): n is a, c, g, or t
  misc_feature (782)..(782): n is a, c, g, or t
  misc_feature (789)..(789): n is a, c, g, or t
  misc_feature (794)..(794): n is a, c, g, or t
  misc_feature (826)..(827): n is a, c, g, or t
  misc_feature (832)..(832): n is a, c, g, or t
  misc_feature (840)..(841): n is a, c, g, or t
  misc_feature (845)..(846): n is a, c, g, or t
  misc_feature (854)..(854): n is a, c, g, or t
  misc_feature (860)..(861): n is a, c, g, or t
  misc_feature (865)..(865): n is a, c, g, or t
  misc_feature (868)..(868): n is a, c, g, or t
  misc_feature (871)..(871): n is a, c, g, or t
  misc_feature (874)..(874): n is a, c, g, or t
  misc_feature (883)..(883): n is a, c, g, or t
  misc_feature (890)..(892): n is a, c, g, or t
  misc_feature (898)..(898): n is a, c, g, or t
  misc_feature (904)..(904): n is a, c, g, or t
  misc_feature (910)..(910): n is a, c, g, or t
  misc_feature (915)..(915): n is a, c, g, or t
  misc_feature (925)..(926): n is a, c, g, or t
  misc_feature (932)..(933): n is a, c, g, or t
  misc_feature (935)..(936): n is a, c, g, or t
  misc_feature (939)..(939): n is a, c, g, or t
  misc_feature (946)..(946): n is a, c, g, or t
  misc_feature (964)..(964): n is a, c, g, or t

SEQ ID NO: 974 - DNA, 563 bp, Homo sapiens; identical to SEQ ID NO: 459

SEQ ID NO: 975 - DNA, 411 bp, Homo sapiens; identical to SEQ ID NO: 460
  misc_feature (84)..(84): n is a, c, g, or t
  misc_feature (269)..(269): n is a, c, g, or t
  misc_feature (271)..(271): n is a, c, g, or t
  misc_feature (277)..(277): n is a, c, g, or t
  misc_feature (280)..(280): n is a, c, g, or t
  misc_feature (282)..(282): n is a, c, g, or t
  misc_feature (287)..(287): n is a, c, g, or t
  misc_feature (293)..(294): n is a, c, g, or t
  misc_feature (301)..(301): n is a, c, g, or t
  misc_feature (308)..(308): n is a, c, g, or t
  misc_feature (322)..(322): n is a, c, g, or t
  misc_feature (329)..(329): n is a, c, g, or t
  misc_feature (332)..(332): n is a, c, g, or t
  misc_feature (364)..(364): n is a, c, g, or t
  misc_feature (370)..(370): n is a, c, g, or t
  misc_feature (384)..(384): n is a, c, g, or t
  misc_feature (398)..(398): n is a, c, g, or t

SEQ ID NO: 976 - DNA, 369 bp, Homo sapiens; identical to SEQ ID NO: 461

SEQ ID NO: 977 - DNA, 288 bp, Homo sapiens; identical to SEQ ID NO: 462

SEQ ID NO: 978 - DNA, 1028 bp, Homo sapiens; identical to SEQ ID NO: 463
  misc_feature (541)..(541): n is a, c, g, or t
  misc_feature (579)..(579): n is a, c, g, or t
  misc_feature (615)..(615): n is a, c, g, or t
  misc_feature (649)..(649): n is a, c, g, or t
  misc_feature (681)..(681): n is a, c, g, or t
  misc_feature (697)..(697): n is a, c, g, or t
  misc_feature (725)..(725): n is a, c, g, or t
  misc_feature (735)..(735): n is a, c, g, or t
  misc_feature (739)..(739): n is a, c, g, or t
  misc_feature (758)..(758): n is a, c, g, or t
  misc_feature (773)..(773): n is a, c, g, or t
  misc_feature (780)..(780): n is a, c, g, or t
  misc_feature (800)..(800): n is a, c, g, or t
  misc_feature (803)..(804): n is a, c, g, or t
  misc_feature (808)..(808): n is a, c, g, or t
  misc_feature (812)..(812): n is a, c, g, or t
  misc_feature (814)..(814): n is a, c, g, or t
  misc_feature (816)..(816): n is a, c, g, or t
  misc_feature (823)..(823): n is a, c, g, or t
  misc_feature (843)..(843): n is a, c, g, or t
  misc_feature (855)..(856): n is a, c, g, or t
  misc_feature (864)..(864): n is a, c, g, or t
  misc_feature (884)..(884): n is a, c, g, or t
  misc_feature (886)..(886): n is a, c, g, or t
  misc_feature (899)..(899): n is a, c, g, or t
  misc_feature (903)..(903): n is a, c, g, or t
  misc_feature (913)..(913): n is a, c, g, or t
  misc_feature (923)..(924): n is a, c, g, or t
  misc_feature (934)..(934): n is a, c, g, or t
  misc_feature (941)..(941): n is a, c, g, or t
  misc_feature (948)..(948): n is a, c, g, or t
  misc_feature (950)..(950): n is a, c, g, or t
  misc_feature (955)..(955): n is a, c, g, or t
  misc_feature (958)..(958): n is a, c, g, or t
  misc_feature (962)..(962): n is a, c, g, or t
  misc_feature (972)..(972): n is a, c, g, or t
  misc_feature (977)..(977): n is a, c, g, or t
  misc_feature (979)..(979): n is a, c, g, or t
  misc_feature (994)..(994): n is a, c, g, or t
  misc_feature (998)..(998): n is a, c, g, or t
  misc_feature (1000)..(1001): n is a, c, g, or t
  misc_feature (1005)..(1006): n is a, c, g, or t
  misc_feature (1009)..(1009): n is a, c, g, or t
  misc_feature (1011)..(1011): n is a, c, g, or t
  misc_feature (1013)..(1013): n is a, c, g, or t
  misc_feature (1018)..(1018): n is a, c, g, or t
  misc_feature (1022)..(1022): n is a, c, g, or t

SEQ ID NO: 979 - DNA, 930 bp, Homo sapiens; identical to SEQ ID NO: 464
  misc_feature (641)..(641): n is a, c, g, or t
  misc_feature (648)..(648): n is a, c, g, or t
  misc_feature (676)..(676): n is a, c, g, or t
  misc_feature (704)..(704): n is a, c, g, or t
  misc_feature (710)..(710): n is a, c, g, or t
  misc_feature (715)..(715): n is a, c, g, or t
  misc_feature (750)..(750): n is a, c, g, or t
  misc_feature (761)..(761): n is a, c, g, or t
  misc_feature (764)..(764): n is a, c, g, or t
  misc_feature (769)..(769): n is a, c, g, or t
  misc_feature (795)..(795): n is a, c, g, or t
  misc_feature (823)..(823): n is a, c, g, or t
  misc_feature (826)..(826): n is a, c, g, or t
  misc_feature (834)..(834): n is a, c, g, or t
  misc_feature (841)..(841): n is a, c, g, or t
  misc_feature (846)..(846): n is a, c, g, or t
  misc_feature (850)..(850): n is a, c, g, or t
  misc_feature (855)..(856): n is a, c, g, or t
  misc_feature (874)..(875): n is a, c, g, or t
  misc_feature (878)..(878): n is a, c, g, or t
  misc_feature (889)..(890): n is a, c, g, or t
  misc_feature (894)..(894): n is a, c, g, or t
  misc_feature (905)..(905): n is a, c, g, or t
  misc_feature (911)..(911): n is a, c, g, or t
  misc_feature (921)..(921): n is a, c, g, or t
  misc_feature (923)..(923): n is a, c, g, or t

SEQ ID NO: 980 - DNA, 444 bp, Homo sapiens; identical to SEQ ID NO: 465

SEQ ID NO: 981 - DNA, 767 bp, Homo sapiens; identical to SEQ ID NO: 466
  misc_feature (478)..(478): n is a, c, g, or t
  misc_feature (553)..(553): n is a, c, g, or t
  misc_feature (574)..(574): n is a, c, g, or t
  misc_feature (598)..(598): n is a, c, g, or t
  misc_feature (641)..(641): n is a, c, g, or t
  misc_feature (665)..(665): n is a, c, g, or t
  misc_feature (681)..(681): n is a, c, g, or t
  misc_feature (711)..(711): n is a, c, g, or t
  misc_feature (716)..(716): n is a, c, g, or t
  misc_feature (718)..(718): n is a, c, g, or t
  misc_feature (725)..(725): n is a, c, g, or t
  misc_feature (734)..(734): n is a, c, g, or t
  misc_feature (741)..(741): n is a, c, g, or t
  misc_feature (749)..(749): n is a, c, g, or t
  misc_feature (759)..(760): n is a, c, g, or t

SEQ ID NO: 982 - DNA, 378 bp, Homo sapiens
tttttactctctctacaaggttttttcctagtgtccaaagagctgttcctctttggactaacagttaaatttacaaggggatttagagggttctgtgggcaaatttaaagttgaactaagattctatcttggacaaccagctatcaccaggctcggtaggtttgtcgcctctacctataaatcttcccactattttgctacatagacgggtgtgctcttttagctgttcttaggtagctcgtctggtttcgggggtcttagctttggctctccttgcaaagttatttctagttaattcattatgcagaaggtataggggttagtccttgctatattatgcttggttataatttttcatctttcccttgccgaaattcc

SEQ ID NO: 983 - DNA, 591 bp, Homo sapiens; identical to SEQ ID NO: 467
  misc_feature (480)..(480): n is a, c, g, or t
  misc_feature (513)..(513): n is a, c, g, or t
  misc_feature (522)..(522): n is a, c, g, or t
  misc_feature (580)..(580): n is a, c, g, or t

SEQ ID NO: 984 - DNA, 604 bp, Homo sapiens; identical to SEQ ID NO: 468
  misc_feature (114)..(114): n is a, c, g, or t
  misc_feature (422)..(422): n is a, c, g, or t
  misc_feature (427)..(427): n is a, c, g, or t
  misc_feature (467)..(467): n is a, c, g, or t
  misc_feature (515)..(515): n is a, c, g, or t
  misc_feature (523)..(523): n is a, c, g, or t
  misc_feature (543)..(543): n is a, c, g, or t
  misc_feature (586)..(586): n is a, c, g, or t
  misc_feature (594)..(594): n is a, c, g, or t
  misc_feature (599)..(599): n is a, c, g, or t

SEQ ID NO: 985 - DNA, 860 bp, Homo sapiens; identical to SEQ ID NO: 469
  misc_feature (432)..(432): n is a, c, g, or t
  misc_feature (443)..(443): n is a, c, g, or t
  misc_feature (468)..(468): n is a, c, g, or t
  misc_feature (470)..(470): n is a, c, g, or t
  misc_feature (478)..(478): n is a, c, g, or t
  misc_feature (514)..(515): n is a, c, g, or t
  misc_feature (524)..(524): n is a, c, g, or t
  misc_feature (541)..(541): n is a, c, g, or t
  misc_feature (553)..(553): n is a, c, g, or t
  misc_feature (556)..(556): n is a, c, g, or t
  misc_feature (558)..(558): n is a, c, g, or t
  misc_feature (563)..(563): n is a, c, g, or t
  misc_feature (567)..(567): n is a, c, g, or t
  misc_feature (631)..(631): n is a, c, g, or t
  misc_feature (648)..(648): n is a, c, g, or t
  misc_feature (656)..(656): n is a, c, g, or t
  misc_feature (660)..(660): n is a, c, g, or t
  misc_feature (673)..(673): n is a, c, g, or t
  misc_feature (696)..(696): n is a, c, g, or t
  misc_feature (703)..(703): n is a, c, g, or t
  misc_feature (709)..(709): n is a, c, g, or t
  misc_feature (721)..(721): n is a, c, g, or t
  misc_feature (727)..(727): n is a, c, g, or t
  misc_feature (730)..(730): n is a, c, g, or t
  misc_feature (743)..(743): n is a, c, g, or t
  misc_feature (745)..(745): n is a, c, g, or t
  misc_feature (750)..(750): n is a, c, g, or t
  misc_feature (759)..(759): n is a, c, g, or t
  misc_feature (763)..(763): n is a, c, g, or t
  misc_feature (773)..(773): n is a, c, g, or t
  misc_feature (782)..(782): n is a, c, g, or t
  misc_feature (792)..(792): n is a, c, g, or t
  misc_feature (799)..(799): n is a, c, g, or t
  misc_feature (805)..(806): n is a, c, g, or t
  misc_feature (811)..(812): n is a, c, g, or t
  misc_feature (816)..(817): n is a, c, g, or t
  misc_feature (819)..(819): n is a, c, g, or t
  misc_feature (822)..(822): n is a, c, g, or t
  misc_feature (824)..(824): n is a, c, g, or t
  misc_feature (827)..(828): n is a, c, g, or t
  misc_feature (833)..(835): n is a, c, g, or t
  misc_feature (844)..(845): n is a, c, g, or t

SEQ ID NO: 986 - DNA, 899 bp, Homo sapiens; identical to SEQ ID NO: 470
  misc_feature (328)..(328): n is a, c, g, or t
  misc_feature (345)..(345): n is a, c, g, or t
  misc_feature (358)..(358): n is a, c, g, or t
  misc_feature (442)..(442): n is a, c, g, or t
  misc_feature (466)..(466): n is a, c, g, or t
  misc_feature (477)..(477): n is a, c, g, or t
  misc_feature (483)..(483): n is a, c, g, or t
  misc_feature (524)..(524): n is a, c, g, or t
  misc_feature (540)..(540): n is a, c, g, or t
  misc_feature (544)..(544): n is a, c, g, or t
  misc_feature (562)..(562): n is a, c, g, or t
  misc_feature (570)..(570): n is a, c, g, or t
  misc_feature (574)..(574): n is a, c, g, or t
  misc_feature (598)..(598): n is a, c, g, or t
  misc_feature (610)..(610): n is a, c, g, or t
  misc_feature (623)..(625): n is a, c, g, or t
  misc_feature (642)..(642): n is a, c, g, or t
  misc_feature (655)..(655): n is a, c, g, or t
  misc_feature (666)..(666): n is a, c, g, or t
  misc_feature (670)..(670): n is a, c, g, or t
  misc_feature (673)..(673): n is a, c, g, or t
  misc_feature (678)..(678): n is a, c, g, or t
  misc_feature (687)..(687): n is a, c, g, or t
  misc_feature (695)..(695): n is a, c, g, or t
  misc_feature (699)..(700): n is a, c, g, or t
  misc_feature (704)..(705): n is a, c, g, or t
  misc_feature (714)..(714): n is a, c, g, or t
  misc_feature (721)..(721): n is a, c, g, or t
  misc_feature (723)..(723): n is a, c, g, or t
  misc_feature (742)..(742): n is a, c, g, or t
  misc_feature (745)..(745): n is a, c, g, or t
  misc_feature (750)..(750): n is a, c, g, or t
  misc_feature (756)..(757): n is a, c, g, or t
  misc_feature (768)..(769): n is a, c, g, or t
  misc_feature (773)..(773): n is a, c, g, or t
  misc_feature (784)..(784): n is a, c, g, or t
  misc_feature (786)..(786): n is a, c, g, or t
  misc_feature (789)..(790): n is a, c, g, or t
  misc_feature (796)..(796): n is a, c, g, or t
  misc_feature (798)..(798): n is a, c, g, or t
  misc_feature (805)..(805): n is a, c, g, or t
  misc_feature (813)..(813): n is a, c, g, or t
  misc_feature (821)..(823): n is a, c, g, or t
  misc_feature (828)..(828): n is a, c, g, or t
  misc_feature (833)..(833): n is a, c, g, or t
  misc_feature (836)..(836): n is a, c, g, or t
  misc_feature (839)..(839): n is a, c, g, or t
  misc_feature (841)..(841): n is a, c, g, or t
  misc_feature (843)..(843): n is a, c, g, or t
  misc_feature (845)..(845): n is a, c, g, or t
  misc_feature (850)..(850): n is a, c, g, or t
  misc_feature (858)..(858): n is a, c, g, or t
  misc_feature (862)..(862): n is a, c, g, or t
  misc_feature (866)..(867): n is a, c, g, or t
  misc_feature (872)..(872): n is a, c, g, or t
  misc_feature (878)..(878): n is a, c, g, or t
  misc_feature (880)..(880): n is a, c, g, or t
  misc_feature (884)..(885): n is a, c, g, or t
  misc_feature (888)..(888): n is a, c, g, or t
  misc_feature (894)..(895): n is a, c, g, or t

SEQ ID NO: 987 - DNA, 552 bp, Homo sapiens; identical to SEQ ID NO: 471
  misc_feature (287)..(287): n is a, c, g, or t
  misc_feature (328)..(328): n is a, c, g, or t
  misc_feature (348)..(348): n is a, c, g, or t
  misc_feature (366)..(366): n is a, c, g, or t
  misc_feature (373)..(373): n is a, c, g, or t
  misc_feature (393)..(393): n is a, c, g, or t
  misc_feature (414)..(414): n is a, c, g, or t
  misc_feature (417)..(417): n is a, c, g, or t
  misc_feature (419)..(419): n is a, c, g, or t
  misc_feature (435)..(435): n is a, c, g, or t
  misc_feature (452)..(452): n is a, c, g, or t
  misc_feature (459)..(459): n is a, c, g, or t
  misc_feature (464)..(464): n is a, c, g, or t
  misc_feature (478)..(478): n is a, c, g, or t
  misc_feature (486)..(486): n is a, c, g, or t
  misc_feature (491)..(492): n is a, c, g, or t
  misc_feature (496)..(496): n is a, c, g, or t
  misc_feature (498)..(498): n is a, c, g, or t
  misc_feature (500)..(500): n is a, c, g, or t
  misc_feature (509)..(509): n is a, c, g, or t
  misc_feature (520)..(520): n is a, c, g, or t
  misc_feature (530)..(530): n is a, c, g, or t
  misc_feature (533)..(533): n is a, c, g, or t
  misc_feature (537)..(537): n is a, c, g, or t

SEQ ID NO: 988 - DNA, 480 bp, Homo sapiens; identical to SEQ ID NO: 472
  misc_feature (165)..(165): n is a, c, g, or t
  misc_feature (223)..(223): n is a, c, g, or t
  misc_feature (300)..(300): n is a, c, g, or t
  misc_feature (302)..(302): n is a, c, g, or t
  misc_feature (307)..(307): n is a, c, g, or t
  misc_feature (309)..(309): n is a, c, g, or t
  misc_feature (335)..(335): n is a, c, g, or t
  misc_feature (363)..(364): n is a, c, g, or t
  misc_feature (366)..(366): n is a, c, g, or t
  misc_feature (372)..(372): n is a, c, g, or t
  misc_feature (382)..(382): n is a, c, g, or t
  misc_feature (405)..(405): n is a, c, g, or t
  misc_feature (417)..(417): n is a, c, g, or t
  misc_feature (421)..(421): n is a, c, g, or t
  misc_feature (423)..(423): n is a, c, g, or t
  misc_feature (426)..(427): n is a, c, g, or t
  misc_feature (435)..(435): n is a, c, g, or t
  misc_feature (444)..(445): n is a, c, g, or t
  misc_feature (452)..(452): n is a, c, g, or t
  misc_feature (460)..(460): n is a, c, g, or t
  misc_feature (463)..(463): n is a, c, g, or t
  misc_feature (473)..(473): n is a, c, g, or t

SEQ ID NO: 989 - DNA, 401 bp, Homo sapiens; identical to SEQ ID NO: 473

SEQ ID NO: 990 - DNA, 412 bp, Homo sapiens; identical to SEQ ID NO: 474
  misc_feature (354)..(354): n is a, c, g, or t
  misc_feature (381)..(381): n is a, c, g, or t

SEQ ID NO: 991 - DNA, 497 bp, Homo sapiens; identical to SEQ ID NO: 475

SEQ ID NO: 992 - DNA, 497 bp, Homo sapiens; identical to SEQ ID NO: 476
  misc_feature (400)..(400): n is a, c, g, or t
  misc_feature (470)..(470): n is a, c, g, or t
  misc_feature (479)..(479): n is a, c, g, or t
  misc_feature (485)..(485): n is a, c, g, or t

SEQ ID NO: 993 - DNA, 841 bp, Homo sapiens; identical to SEQ ID NO: 477
  misc_feature (345)..(345): n is a, c, g, or t
  misc_feature (440)..(440): n is a, c, g, or t
  misc_feature (449)..(449): n is a, c, g, or t
  misc_feature (474)..(474): n is a, c, g, or t
  misc_feature (479)..(479): n is a, c, g, or t
  misc_feature (486)..(486): n is a, c, g, or t
  misc_feature (509)..(509): n is a, c, g, or t
  misc_feature (532)..(532): n is a, c, g, or t
  misc_feature (554)..(554): n is a, c, g, or t
  misc_feature (559)..(559): n is a, c, g, or t
  misc_feature (581)..(581): n is a, c, g, or t
  misc_feature (608)..(608): n is a, c, g, or t
  misc_feature (616)..(617): n is a, c, g, or t
  misc_feature (631)..(631): n is a, c, g, or t
  misc_feature (648)..(648): n is a, c, g, or t
  misc_feature (663)..(663): n is a, c, g, or t
  misc_feature (665)..(665): n is a, c, g, or t
  misc_feature (672)..(672): n is a, c, g, or t
  misc_feature (675)..(675): n is a, c, g, or t
  misc_feature (679)..(679): n is a, c, g, or t
  misc_feature (690)..(690): n is a, c, g, or t
  misc_feature (703)..(703): n is a, c, g, or t
  misc_feature (705)..(705): n is a, c, g, or t
  misc_feature (712)..(712): n is a, c, g, or t
  misc_feature (715)..(715): n is a, c, g, or t
  misc_feature (747)..(747): n is a, c, g, or t
  misc_feature (758)..(759): n is a, c, g, or t
  misc_feature (763)..(763): n is a, c, g, or t
  misc_feature (767)..(767): n is a, c, g, or t
  misc_feature (774)..(774): n is a, c, g, or t
  misc_feature (783)..(783): n is a, c, g, or t
  misc_feature (787)..(787): n is a, c, g, or t
  misc_feature (794)..(795): n is a, c, g, or t
  misc_feature (800)..(800): n is a, c, g, or t
  misc_feature (805)..(808): n is a, c, g, or t
  misc_feature (813)..(813): n is a, c, g, or t
  misc_feature (817)..(817): n is a, c, g, or t

SEQ ID NO: 994 - DNA, 700 bp, Homo sapiens
  misc_feature (450)..(450): n is a, c, g, or t
  misc_feature (477)..(477): n is a, c, g, or t
  misc_feature (541)..(541): n is a, c, g, or t
  misc_feature (556)..(556): n is a, c, g, or t
  misc_feature (583)..(583): n is a, c, g, or t
  misc_feature (608)..(608): n is a, c, g, or t
  misc_feature (611)..(611): n is a, c, g, or t
  misc_feature (627)..(628): n is a, c, g, or t
  misc_feature (630)..(630): n is a, c, g, or t
  misc_feature (640)..(640): n is a, c, g, or t
  misc_feature (670)..(670): n is a, c, g, or t
  misc_feature (679)..(679): n is a, c, g, or t
  misc_feature (682)..(682): n is a, c, g, or t
  misc_feature (692)..(692): n is a, c, g, or t
cattgattgaatagttataaagatgttatagtaaatttattttattttagatattaaatgatgttttattagataaatttcaatcagggtttttagattaaacaaacaaacaattgggtacccagttaaattttcatttcagataaacaacaaataattttttagtataagtacattattgtttatctgaaattttaattgaactaacaatcctagtttgatactcccagtcttgtcattgccagctgtgttggtagtgctgtgttgaattacggaataatgagttagaactattaaaacagccaaaactccacagtcaatattagtaatttcttgctggttgaaacttgtttattatgtcaaatagattcttataatattatttaaatgactgcatttttaaatacaaggctttatatttttaactttaagatgtttttatgtgctctncaaattttttttactggttctgattgnatggaaatataaaagtaaatatgaaacatttaaaatataattggtggggcatttttaattaagnttggtttatttaagnttaaggtaattccatgctggggttcantagaacattccgaatctggatctgnggntccagcagatattccnnantacaaattancttcaagtccccttctggaccaaaaaggtnaccaccaangangggaggaatnaaggggaa

SEQ ID NO: 995 - DNA, 221 bp, Homo sapiens; identical to SEQ ID NO: 479
  misc_feature (5)..(5): n is a, c, g, or t
  misc_feature (11)..(11): n is a, c, g, or t
  misc_feature (16)..(16): n is a, c, g, or t
  misc_feature (24)..(24): n is a, c, g, or t
  misc_feature (33)..(33): n is a, c, g, or t
  misc_feature (37)..(37): n is a, c, g, or t
  misc_feature (41)..(41): n is a, c, g, or t
  misc_feature (44)..(44): n is a, c, g, or t
  misc_feature (55)..(55): n is a, c, g, or t
  misc_feature (63)..(63): n is a, c, g, or t
  misc_feature (70)..(70): n is a, c, g, or t
  misc_feature (72)..(72): n is a, c, g, or t
  misc_feature (74)..(74): n is a, c, g, or t
  misc_feature (76)..(76): n is a, c, g, or t
  misc_feature (86)..(86): n is a, c, g, or t
  misc_feature (89)..(89): n is a, c, g, or t
  misc_feature (94)..(94): n is a, c, g, or t
  misc_feature (98)..(98): n is a, c, g, or t
  misc_feature (100)..(100): n is a, c, g, or t
  misc_feature (102)..(102): n is a, c, g, or t
  misc_feature (104)..(104): n is a, c, g, or t
  misc_feature (117)..(117): n is a, c, g, or t
  misc_feature (119)..(119): n is a, c, g, or t
  misc_feature (121)..(121): n is a, c, g, or t
  misc_feature (125)..(125): n is a, c, g, or t
  misc_feature (137)..(137): n is a, c, g, or t
  misc_feature (139)..(139): n is a, c, g, or t
  misc_feature (143)..(143): n is a, c, g, or t
  misc_feature (146)..(146): n is a, c, g, or t
  misc_feature (160)..(160): n is a, c, g, or t
  misc_feature (164)..(164): n is a, c, g, or t
  misc_feature (166)..(166): n is a, c, g, or t
  misc_feature (169)..(169): n is a, c, g, or t
  misc_feature (171)..(171): n is a, c, g, or t
  misc_feature (179)..(179): n is a, c, g, or t
  misc_feature (184)..(184): n is a, c, g, or t
  misc_feature (186)..(186): n is a, c, g, or t
  misc_feature (194)..(195): n is a, c, g, or t
  misc_feature (197)..(197): n is a, c, g, or t
  misc_feature (201)..(201): n is a, c, g, or t
  misc_feature (208)..(208): n is a, c, g, or t
  misc_feature (212)..(212): n is a, c, g, or t

SEQ ID NO: 996 - DNA, 956 bp, Homo sapiens
  misc_feature (552)..(552): n is a, c, g, or t
  misc_feature (632)..(632): n is a, c, g, or t
  misc_feature (668)..(668): n is a, c, g, or t
  misc_feature (692)..(692): n is a, c, g, or t
  misc_feature (721)..(721): n is a, c, g, or t
  misc_feature (739)..(739): n is a, c, g, or t
  misc_feature (778)..(778): n is a, c, g, or t
  misc_feature (795)..(795): n is a, c, g, or t
  misc_feature (828)..(828): n is a, c, g, or t
  misc_feature (851)..(851): n is a, c, g, or t
  misc_feature (855)..(855): n is a, c, g, or t
  misc_feature (858)..(858): n is a, c, g, or t
  misc_feature (865)..(865): n is a, c, g, or t
  misc_feature (880)..(880): n is a, c, g, or t
  misc_feature (898)..(898): n is a, c, g, or t
  misc_feature (905)..(905): n is a, c, g, or t
  misc_feature (918)..(918): n is a, c, g, or t
  misc_feature (929)..(929): n is a, c, g, or t
  misc_feature (934)..(934): n is a, c, g, or t
  misc_feature (940)..(940): n is a, c, g, or t
cggtattccgaaaaaatgtttccaactccgctgaaatgttgctgaaaagcatggtgctggtaacagttcaacaatccgtggctgctcattcttgcctactttactctcccactgaagcaggttagcgttgaaggtggtatggaaaagcctgcatgcctgttcaattcttttgtttcttctccttccccctccccctacctccttcccctcactcctcccctccttcgctcgctcaacctcttttgttcagtatgtgtaacttgaagctaatttgtactactggatatctgactggagccacagatacagaatctgtattgttcttactgaaacacagcatggaattaacattaaacttaaataaaacaaacctaaattaaaaatgcccaacaaattatattttaaatgtttcatatttacttttatatttccatacaatcagaaacagtaaaaaaaatttggagagcacataaaaacatcttaaagttaaaaatataaagccttgtatttaaaaatgcagtcatttaaataatattataagaatctatttgnacataataaacaagtttcaaccagcaagaaattactaatattgactgtggagttttggctggttaatagttctaactcantattccgtaatcaacacaagcactaccaacacaagntggcaatgacaagaatgggaagtntcaaactaggatggtaagtcaattaaaanttcagataaccataatgnacttatactaaaaaattattttgggggttatttgaaaangaaaattaactgggggncccaattggttggttgggtaaatttaaaacccnggttggaaattatctaataaacnttcnttnaatactnaaaaaaaataaattnccttaccactttttaccntttcatnaagggggaattcnattaaccccgnggttncatttncaatggggtggggggc

SEQ ID NO: 997 - DNA, 325 bp, Homo sapiens; identical to SEQ ID NO: 481
  misc_feature (6)..(6): n is a, c, g, or t
  misc_feature (18)..(19): n is a, c, g, or t
  misc_feature (25)..(26): n is a, c, g, or t
  misc_feature (29)..(29): n is a, c, g, or t
  misc_feature (42)..(42): n is a, c, g, or t
  misc_feature (52)..(52): n is a, c, g, or t
  misc_feature (63)..(63): n is a, c, g, or t
  misc_feature (66)..(66): n is a, c, g, or t
  misc_feature (70)..(70): n is a, c, g, or t
  misc_feature (73)..(73): n is a, c, g, or t
  misc_feature (92)..(95): n is a, c, g, or t
  misc_feature (108)..(108): n is a, c, g, or t
  misc_feature (117)..(117): n is a, c, g, or t
  misc_feature (155)..(155): n is a, c, g, or t
  misc_feature (157)..(157): n is a, c, g, or t
  misc_feature (178)..(178): n is a, c, g, or t
  misc_feature (194)..(194): n is a, c, g, or t
  misc_feature (197)..(197): n is a, c, g, or t
  misc_feature (215)..(215): n is a, c, g, or t
  misc_feature (222)..(222): n is a, c, g, or t
  misc_feature (232)..(232): n is a, c, g, or t
  misc_feature (236)..(236): n is a, c, g, or t
  misc_feature (255)..(255): n is a, c, g, or t
  misc_feature (269)..(269): n is a, c, g, or t
  misc_feature (273)..(273): n is a, c, g, or t
  misc_feature (276)..(276): n is a, c, g, or t
  misc_feature (283)..(284): n is a, c, g, or t
  misc_feature (287)..(287): n is a, c, g, or t
  misc_feature (289)..(289): n is a, c, g, or t
  misc_feature (291)..(291): n is a, c, g, or t
  misc_feature (297)..(297): n is a, c, g, or t
  misc_feature (302)..(303): n is a, c, g, or t
  misc_feature (313)..(313): n is a, c, g, or t

SEQ ID NO: 998 - DNA, 234 bp, Homo sapiens; identical to SEQ ID NO: 482
  misc_feature (3)..(3): n is a, c, g, or t
  misc_feature (5)..(6): n is a, c, g, or t
  misc_feature (15)..(15): n is a, c, g, or t
  misc_feature (18)..(18): n is a, c, g, or t
  misc_feature (20)..(21): n is a, c, g, or t
  misc_feature (23)..(23): n is a, c, g, or t
  misc_feature (25)..(25): n is a, c, g, or t
  misc_feature (27)..(27): n is a, c, g, or t
  misc_feature (32)..(32): n is a, c, g, or t
  misc_feature (42)..(42): n is a, c, g, or t
  misc_feature (55)..(55): n is a, c, g, or t
  misc_feature (57)..(59): n is a, c, g, or t
  misc_feature (64)..(64): n is a, c, g, or t
  misc_feature (81)..(81): n is a, c, g, or t
  misc_feature (84)..(84): n is a, c, g, or t
  misc_feature (86)..(86): n is a, c, g, or t
  misc_feature (89)..(89): n is a, c, g, or t
  misc_feature (92)..(93): n is a, c, g, or t
  misc_feature (98)..(99): n is a, c, g, or t
  misc_feature (104)..(105): n is a, c, g, or t
  misc_feature (108)..(108): n is a, c, g, or t
  misc_feature (110)..(111): n is a, c, g, or t
  misc_feature (113)..(113): n is a, c, g, or t
  misc_feature (115)..(115): n is a, c, g, or t
  misc_feature (118)..(118): n is a, c, g, or t
  misc_feature (121)..(122): n is a, c, g, or t
  misc_feature (124)..(124): n is a, c, g, or t
  misc_feature (131)..(131): n is a, c, g, or t
  misc_feature (134)..(134): n is a, c, g, or t
  misc_feature (138)..(138): n is a, c, g, or t
  misc_feature (140)..(141): n is a, c, g, or t
  misc_feature (143)..(143): n is a, c, g, or t
  misc_feature (146)..(146): n is a, c, g, or t
  misc_feature (148)..(148): n is a, c, g, or t
  misc_feature (151)..(151): n is a, c, g, or t
  misc_feature (154)..(154): n is a, c, g, or t
  misc_feature (157)..(157): n is a, c, g, or t
  misc_feature (160)..(160): n is a, c, g, or t
  misc_feature (162)..(162): n is a, c, g, or t
  misc_feature (168)..(168): n is a, c, g, or t
  misc_feature (184)..(185): n is a, c, g, or t
  misc_feature (189)..(190): n is a, c, g, or t
  misc_feature (192)..(192): n is a, c, g, or t
  misc_feature (194)..(194): n is a, c, g, or t
  misc_feature (201)..(201): n is a, c, g, or t
  misc_feature (203)..(203): n is a, c, g, or t
  misc_feature (207)..(208): n is a, c, g, or t
  misc_feature (212)..(212): n is a, c, g, or t
  misc_feature (221)..(221): n is a, c, g, or t
  misc_feature (223)..(223): n is a, c, g, or t

SEQ ID NO: 999 - DNA, 706 bp, Homo sapiens; identical to SEQ ID NO: 483
  misc_feature (650)..(650): n is a, c, g, or t
  misc_feature (691)..(691): n is a, c, g, or t
  misc_feature (694)..(694): n is a, c, g, or t
  misc_feature (700)..(700): n is a, c, g, or t

SEQ ID NO: 1000 - DNA, 467 bp, Homo sapiens; identical to SEQ ID NO: 484
  misc_feature (380)..(380): n is a, c, g, or t
  misc_feature (382)..(382): n is a, c, g, or t
  misc_feature (410)..(410): n is a, c, g, or t

SEQ ID NO: 1001 - DNA, 540 bp, Homo sapiens; identical to SEQ ID NO: 485
  misc_feature (494)..(494): n is a, c, g, or t

SEQ ID NO: 1002 - DNA, 513 bp, Homo sapiens; identical to SEQ ID NO: 486
  misc_feature (384)..(384): n is a, c, g, or t
  misc_feature (441)..(441): n is a, c, g, or t
  misc_feature (451)..(451): n is a, c, g, or t
  misc_feature (468)..(468): n is a, c, g, or t
  misc_feature (473)..(473): n is a, c, g, or t
  misc_feature (484)..(484): n is a, c, g, or t
  misc_feature (488)..(488): n is a, c, g, or t

SEQ ID NO: 1003 - DNA, 533 bp, Homo sapiens; identical to SEQ ID NO: 487
  misc_feature (363)..(363): n is a, c, g, or t
  misc_feature (427)..(427): n is a, c, g, or t
  misc_feature (430)..(430): n is a, c, g, or t
  misc_feature (453)..(453): n is a, c, g, or t
  misc_feature (481)..(481): n is a, c, g, or t
  misc_feature (495)..(495): n is a, c, g, or t
  misc_feature (499)..(499): n is a, c, g, or t
  misc_feature (518)..(518): n is a, c, g, or t
  misc_feature (521)..(522): n is a, c, g, or t
  misc_feature (524)..(524): n is a, c, g, or t
  misc_feature (530)..(530): n is a, c, g, or t

SEQ ID NO: 1004 - DNA, 885 bp, Homo sapiens
  misc_feature (535)..(535): n is a, c, g, or t
  misc_feature (569)..(569): n is a, c, g, or t
  misc_feature (582)..(582): n is a, c, g, or t
  misc_feature (587)..(587): n is a, c, g, or t
  misc_feature (604)..(604): n is a, c, g, or t
  misc_feature (611)..(611): n is a, c, g, or t
  misc_feature (623)..(623): n is a, c, g, or t
  misc_feature (681)..(681): n is a, c, g, or t
  misc_feature (690)..(690): n is a, c, g, or t
  misc_feature (702)..(702): n is a, c, g, or t
  misc_feature (721)..(721): n is a, c, g, or t
  misc_feature (748)..(748): n is a, c, g, or t
  misc_feature (767)..(767): n is a, c, g, or t
  misc_feature (777)..(777): n is a, c, g, or t
  misc_feature (782)..(782): n is a, c, g, or t
  misc_feature (786)..(786): n is a, c, g, or t
  misc_feature (788)..(788): n is a, c, g, or t
  misc_feature (795)..(795): n is a, c, g, or t
  misc_feature (799)..(799): n is a, c, g, or t
  misc_feature (801)..(801): n is a, c, g, or t
  misc_feature (806)..(806): n is a, c, g, or t
  misc_feature (812)..(812): n is a, c, g, or t
  misc_feature (816)..(817): n is a, c, g, or t
  misc_feature (819)..(819): n is a, c, g, or t
  misc_feature (822)..(822): n is a, c, g, or t
  misc_feature (835)..(835): n is a, c, g, or t
  misc_feature (844)..(844): n is a, c, g, or t
  misc_feature (854)..(854): n is a, c, g, or t
  misc_feature (860)..(860): n is a, c, g, or t
  misc_feature (877)..(877): n is a, c, g, or t
cttgggattggtggcgacgactcctggagcccgtcagtatcggcggaattccggccagaggctgttcaccttggagacctgctgcggatatgggtacggcccggcgcgagatttacaccctctcccccggattttcaggggccagcgagagctcaccggacgccgccggaaccgcgacgctttccaagacacgggcccctctctcggggcgaacccattccagggcgccctgcccttcacaaagaaaagagaactctccccggggctcccgccggcttctccgggatcggtcgcgttaccgcactggacgcctcgcggcgcccatctccgccactccggattcggggatctgaacccgactccctttcgatcggccgagggcaacggaggccatcgcccgtcccttcggaacggcgctcgcccatctcttaggaccgactgacccatgttcaactgctggttcacatggaacccttcttcacttcggccttcaaaagttttcgtttgaatatttgctactaccaccaagatctgnacctgcgggggttccacccgggcccgcgccctangctttaaaggttnaccgnaacgggccttctacttntcgcggngtaacgtccccngggcttccggggcggggagcgcggaatttcaactgacgccggtcgcaccattaccaantggtctggnggcaaaaataanataaccgggcaggcctgtnaacccaattcaacaaatgggggccgtnctatggatcccaactcggnccaacttgancatanttgngntttttanggancnaaaancttggngaannanggnaaacttttcttgnggaatggtntcgttcaatncccaanaacaaccgaactaaagngaaaccgg

SEQ ID NO: 1005 - DNA, 533 bp, Homo sapiens; identical to SEQ ID NO: 489
  misc_feature (483)..(483): n is a, c, g, or t
  misc_feature (499)..(499): n is a, c, g, or t
  misc_feature (519)..(519): n is a, c, g, or t
  misc_feature (530)..(530): n is a, c, g, or t

SEQ ID NO: 1006 - DNA, 116 bp, Homo sapiens; identical to SEQ ID NO: 490
  misc_feature (73)..(73): n is a, c, g, or t
  misc_feature (82)..(82): n is a, c, g, or t
  misc_feature (87)..(87): n is a, c, g, or t
  misc_feature (90)..(90): n is a, c, g, or t
  misc_feature (106)..(106): n is a, c, g, or t

SEQ ID NO: 1007 - DNA, 567 bp, Homo sapiens; identical to SEQ ID NO: 491
  misc_feature (529)..(529): n is a, c, g, or t

SEQ ID NO: 1008 - DNA, 492 bp, Homo sapiens; identical to SEQ ID NO: 492
  misc_feature (274)..(274): n is a, c, g, or t
  misc_feature (306)..(306): n is a, c, g, or t
  misc_feature (408)..(408): n is a, c, g, or t

SEQ ID NO: 1009 - DNA, 567 bp, Homo sapiens; identical to SEQ ID NO: 493
  misc_feature (423)..(423): n is a, c, g, or t
  misc_feature (505)..(505): n is a, c, g, or t
  misc_feature (525)..(525): n is a, c, g, or t

SEQ ID NO: 1010 - DNA, 512 bp, Homo sapiens; identical to SEQ ID NO: 494
  misc_feature (471)..(471): n is a, c, g, or t

SEQ ID NO: 1011 - DNA, 572 bp, Homo sapiens; identical to SEQ ID NO: 495
  misc_feature (567)..(567): n is a, c, g, or t

SEQ ID NO: 1012 - DNA, 488 bp, Homo sapiens; identical to SEQ ID NO: 496
  misc_feature (4)..(4): n is a, c, g, or t
  misc_feature (274)..(274): n is a, c, g, or t
  misc_feature (294)..(294): n is a, c, g, or t
  misc_feature (306)..(306): n is a, c, g, or t
  misc_feature (350)..(350): n is a, c, g, or t
  misc_feature (407)..(407): n is a, c, g, or t
  misc_feature (409)..(409): n is a, c, g, or t
  misc_feature (458)..(458): n is a, c, g, or t
  misc_feature (462)..(462): n is a, c, g, or t
  misc_feature (475)..(475): n is a, c, g, or t

SEQ ID NO: 1013 - DNA, 560 bp, Homo sapiens; identical to SEQ ID NO: 497
  misc_feature (380)..(380): n is a, c, g, or t
  misc_feature (543)..(543): n is a, c, g, or t

SEQ ID NO: 1014 - DNA, 514 bp, Homo sapiens; identical to SEQ ID NO: 498
  misc_feature (486)..(486): n is a, c, g, or t
  misc_feature (498)..(498): n is a, c, g, or t

SEQ ID NO: 1015 - DNA, 531 bp, Homo sapiens; identical to SEQ ID NO: 499
  misc_feature (403)..(403): n is a, c, g, or t
  misc_feature (480)..(480): n is a, c, g, or t
  misc_feature (512)..(512): n is a, c, g, or t

SEQ ID NO: 1016 - DNA, 539 bp, Homo sapiens; identical to SEQ ID NO: 500
  misc_feature (385)..(385): n is a, c, g, or t
  misc_feature (396)..(396): n is a, c, g, or t
  misc_feature (441)..(441): n is a, c, g, or t
  misc_feature (446)..(446): n is a, c, g, or t
  misc_feature (489)..(489): n is a, c, g, or t
  misc_feature (518)..(518): n is a, c, g, or t
  misc_feature (528)..(528): n is a, c, g, or t

SEQ ID NO: 1017 - DNA, 562 bp, Homo sapiens; identical to SEQ ID NO: 501
  misc_feature (522)..(522): n is a, c, g, or t

SEQ ID NO: 1018 - DNA, 506 bp, Homo sapiens; identical to SEQ ID NO: 502
  misc_feature (441)..(441): n is a, c, g, or t
  misc_feature (486)..(486): n is a, c, g, or t
  misc_feature (489)..(489): n is a, c, g, or t
  misc_feature (502)..(502): n is a, c, g, or t

SEQ ID NO: 1019 - DNA, 445 bp, Homo sapiens; identical to SEQ ID NO: 503

SEQ ID NO: 1020 - DNA, 445 bp, Homo sapiens; identical to SEQ ID NO: 504
  misc_feature (331)..(331): n is a, c, g, or t
  misc_feature (338)..(338): n is a, c, g, or t
  misc_feature (344)..(344): n is a, c, g, or t
  misc_feature (432)..(432): n is a, c, g, or t

SEQ ID NO: 1021 - DNA, 511 bp, Homo sapiens; identical to SEQ ID NO: 505
  misc_feature (239)..(239): n is a, c, g, or t
  misc_feature (277)..(277): n is a, c, g, or t
  misc_feature (309)..(309): n is a, c, g, or t
  misc_feature (410)..(410): n is a, c, g, or t
  misc_feature (443)..(443): n is a, c, g, or t
  misc_feature (455)..(455): n is a, c, g, or t
  misc_feature (458)..(458): n is a, c, g, or t
  misc_feature (461)..(462): n is a, c, g, or t
  misc_feature (476)..(476): n is a, c, g, or t
  misc_feature (482)..(482): n is a, c, g, or t
  misc_feature (486)..(486): n is a, c, g, or t
  misc_feature (491)..(491): n is a, c, g, or t
  misc_feature (494)..(494): n is a, c, g, or t
  misc_feature (507)..(507): n is a, c, g, or t

SEQ ID NO: 1022 - DNA, 534 bp, Homo sapiens; identical to SEQ ID NO: 506
  misc_feature (390)..(390): n is a, c, g, or t
  misc_feature (460)..(460): n is a, c, g, or t
  misc_feature (495)..(495): n is a, c, g, or t
  misc_feature (504)..(504): n is a, c, g, or t
  misc_feature (528)..(528): n is a, c, g, or t

SEQ ID NO: 1023 - DNA, 416 bp, Homo sapiens; identical to SEQ ID NO: 507

SEQ ID NO: 1024 - DNA, 369 bp, Homo sapiens; identical to SEQ ID NO: 508
  misc_feature (222)..(222): n is a, c, g, or t
  misc_feature (359)..(359): n is a, c, g, or t

SEQ ID NO: 1025 - DNA, 566 bp, Homo sapiens; identical to SEQ ID NO: 509
  misc_feature (507)..(507): n is a, c, g, or t
  misc_feature (538)..(538): n is a, c, g, or t

SEQ ID NO: 1026 - DNA, 492 bp, Homo sapiens; identical to SEQ ID NO: 510
  misc_feature (400)..(400): n is a, c, g, or t
  misc_feature (467)..(467): n is a, c, g, or t
  misc_feature (482)..(483): n is a, c, g, or t
  misc_feature (487)..(487): n is a, c, g, or t

SEQ ID NO: 1027 - DNA, 528 bp, Homo sapiens; identical to SEQ ID NO: 511
  misc_feature (486)..(486): n is a, c, g, or t
  misc_feature (499)..(499): n is a, c, g, or t

SEQ ID NO: 1028 - DNA, 547 bp, Homo sapiens; identical to SEQ ID NO: 512
  misc_feature (3)..(4): n is a, c, g, or t
  misc_feature (11)..(11): n is a, c, g, or t
  misc_feature (14)..(14): n is a, c, g, or t
  misc_feature (24)..(24): n is a, c, g, or t
  misc_feature (35)..(35): n is a, c, g, or t
  misc_feature (56)..(56): n is a, c, g, or t
  misc_feature (98)..(98): n is a, c, g, or t
  misc_feature (530)..(530): n is a, c, g, or t

SEQ ID NO: 1029 - DNA, 718 bp, Homo sapiens; identical to SEQ ID NO: 513
  misc_feature (420)..(420): n is a, c, g, or t
  misc_feature (460)..(460): n is a, c, g, or t
  misc_feature (470)..(470): n is a, c, g, or t
  misc_feature (476)..(476): n is a, c, g, or t
  misc_feature (509)..(509): n is a, c, g, or t
  misc_feature (570)..(570): n is a, c, g, or t
  misc_feature (611)..(611): n is a, c, g, or t
  misc_feature (621)..(621): n is a, c, g, or t
  misc_feature (629)..(629): n is a, c, g, or t
  misc_feature (645)..(645): n is a, c, g, or t
  misc_feature (659)..(659): n is a, c, g, or t
  misc_feature (661)..(661): n is a, c, g, or t
  misc_feature (670)..(670): n is a, c, g, or t
  misc_feature (674)..(674): n is a, c, g, or t
  misc_feature (676)..(676): n is a, c, g, or t
  misc_feature (678)..(678): n is a, c, g, or t
  misc_feature (684)..(684): n is a, c, g, or t
  misc_feature (688)..(688): n is a, c, g, or t
  misc_feature (692)..(692): n is a, c, g, or t
  misc_feature (702)..(702): n is a, c, g, or t
  misc_feature (709)..(709): n is a, c, g, or t
  misc_feature (712)..(712): n is a, c, g, or t

SEQ ID NO: 1030 - DNA, 979 bp, Homo sapiens; identical to SEQ ID NO: 514
  misc_feature (597)..(597): n is a, c, g, or t
  misc_feature (660)..(660): n is a, c, g, or t
  misc_feature (693)..(693): n is a, c, g, or t
  misc_feature (720)..(720): n is a, c, g, or t
  misc_feature (731)..(731): n is a, c, g, or t
  misc_feature (735)..(735): n is a, c, g, or t
  misc_feature (742)..(742): n is a, c, g, or t
  misc_feature (751)..(751): n is a, c, g, or t
  misc_feature (764)..(764): n is a, c, g, or t
  misc_feature (767)..(767): n is a, c, g, or t
  misc_feature (803)..(803): n is a, c, g, or t
  misc_feature (805)..(806): n is a, c, g, or t
  misc_feature (808)..(808): n is a, c, g, or t
  misc_feature (838)..(838): n is a, c, g, or t
  misc_feature (844)..(844): n is a, c, g, or t
  misc_feature (848)..(848): n is a, c, g, or t
  misc_feature (860)..(860): n is a, c, g, or t
  misc_feature (893)..(895): n is a, c, g, or t
  misc_feature (909)..(910): n is a, c, g, or t
  misc_feature (919)..(919): n is a, c, g, or t
  misc_feature (925)..(925): n is a, c, g, or t
  misc_feature (931)..(931): n is a, c, g, or t
  misc_feature (954)..(954): n is a, c, g, or t
  misc_feature (975)..(975): n is a, c, g, or t

SEQ ID NO: 1031 - DNA, 718 bp, Homo sapiens; identical to SEQ ID NO: 515
  misc_feature (395)..(395): n is a, c, g, or t
  misc_feature (439)..(439): n is a, c, g, or t
  misc_feature (527)..(527): n is a, c, g, or t
  misc_feature (542)..(542): n is a, c, g, or t
  misc_feature (547)..(547): n is a, c, g, or t
  misc_feature (582)..(582): n is a, c, g, or t
  misc_feature (589)..(589): n is a, c, g, or t
  misc_feature (604)..(604): n is a, c, g, or t
  misc_feature (614)..(614): n is a, c, g, or t
  misc_feature (625)..(625): n is a, c, g, or t
  misc_feature (640)..(640): n is a, c, g, or t
  misc_feature (672)..(672): n is a, c, g, or t
  misc_feature (688)..(688): n is a, c, g, or t
  misc_feature (708)..(708): n is a, c, g, or t

SEQ ID NO: 1032 - DNA, 817 bp, Homo sapiens; identical to SEQ ID NO: 597

SEQ ID NO: 1033 - DNA, 1182 bp, Homo sapiens
tagttctccctgagtgagacttgcctgcttctctggcccctggtcctgtcctgttctccagcatggtgtgtctgaagctccctggaggctcctgcatgacagcgctgacagtgacactgatggtgctgagctccccactggctttggctggggacacccgaccacgtttcttgtggcagcttaagtttgaatgtcatttcttcaatgggacggagcgggtgcggttgctggaaagatgcatctataaccaagaggagtccgtgcgcttcgacagcgacgtgggggagtaccgggcggtgacggagctggggcggcctgatgccgagtactggaacagccagaaggacctcctggagcagaggcgggccgcggtggacacctactgcagacacaactacggggttggtgagagcttcacagtgcagcggcgagttgagcctaaggtgactgtgtatccttcaaagacccagcccctgcagcaccacaacctcctggtctgctctgtgagtggtttctatccaggcagcattgaagtcaggtggttccggaacggccaggaagagaaggctggggtggtgtccacaggcctgatccagaatggagattggaccttccagaccctggtgatgctggaaacagttcctcggagtggagaggtttacacctgccaagtggagcacccaagtgtgacgagccctctcacagtggaatggagagcacggtctgaatctgcacagagcaagatgctgagtggagtcgggggcttcgtgctgggcctgctcttccttggggccgggctgttcatctacttcaggaatcagaaaggacactctggacttcagccaacaggattcctgagctgaaatgcagatgaccacattcaaggaagaaccttctgtcccagctttgcagaatgaaaagctttcctgcttggcagttattcttccacaagagagggctttctcaggacctggttgctactggttcggcaactgcagaaaatgtcctcccttgtggcttcctcagctcctgcccttggcctgaagtcccagcattgatgacagcgcctcatcttcaacttttgtgctcccctttgcctaaaccgtatggcctcccgtgcatctgtactcaccctgtacgacaaacacattacattattaaatgtttctcaaagatggagtt

SEQ ID NO: 1034 - DNA, 82027 bp, Homo sapiens
agcagtcgtgcattcccagcctcgcctcgggtgtagggattgcatagaaaagcaaaactacacagtcttgactgtgtagttttgtttttaggattagaggctcaccgattcatgtcggagatggtcagaaaaaccaactctccataggacgtcgtttcagaagcaaccttgggcttagtcccaccctttttaggcactcttgagaaatcaagtgcctagaaagatgacaactcaagcaccgacgtttacgcagccgttacaaagcgttgtggtactggagggtagtaccgcaacctttgaggctcacattagtggttttccagttcctgaggtgagctggtttagggatggccaggtgatttccacttccactctgcccggcgtgcagatctcctttagcgatggccgcgctaaactgacgatccccgccgtgactaaagccaacagtggacgatattccctgaaagccaccaatggatctggacaagcgactagtactgctgagcttctcgtgaaagctgagacagcaccacccaacttcgttcaacgactgcagagcatgaccgtgagacaaggaagccaagtgagactccaagtgagagtgactggaatccctacacctgtggtgaagttctaccgggatggagccgaaatccagagctcccttgatttccaaatttcacaagaaggcgacctctacagcttactgattgcagaagcataccctgaggactcagggacctattcagtaaatgccaccaatagcgttggaagagctacttcgactgctgaattactggttcaaggtgaagaagaagtacctgctaaaaagacaaagacaattgtttcgactgctcagatctcagaatcaagacaaacccgaattgaaaagaagattgaagcccactttgatgccagatcaattgcaacagttgagatggtcatagatggtgccgctgggcaacagctgccacataaaacacctcccaggattcctccgaagccaaagtcaagatccccaacaccaccgtctattgctgccaaagcacagctggctcggcagcagtccccatcgcccataagacactccccttccccggtcagacacgtgcgggcaccgaccccatctccggtcaggtccgtgtctccagcagcaagaatctccacatcccccatcaggtctgttaggtctccattgctcatgcgtaagactcaggcatccaccgtggccacaggtcctgaagtgcctcccccttggaagcaagagggctacgtggcctcctcatctgaggctgagatgagagagacaacgctgacaacctctactcagatcaggacagaagagagatgggaagggagatacggtgtccaggagcaagtgaccatcagtggtgctgcgggtgctgccgccagtgtgtcggccagtgctagctacgcagcagaggctgttgccactggtgctaaagaggtgaaacaagatgctgacaaaagtgcagctgttgcgactgttgttgctgccgttgatatggccagagtgagagaaccagtgatcagcgctgtagagcagactgctcagaggacaaccacgactgctgtgcacatccaacctgctcaagaacaggtaagaaaggaagcggagaagactgctgtaactaaggtagtagtggccgccgataaagccaaggaacaagaattaaaatcaagaaccaaagaagtaattaccacaaagcaagagcagatgcacgtaactcatgagcagataagaaaagaaactgaaaaaacatttgtaccaaaggtagtaatttccgcagctaaagccaaagaacaagaaactagaatttctgaagaaattactaagaaacagaaacaagtaactcaagaagcaataatgaaggaaactaggaaaacagttgtacctaaagtcatagttgccacacccaaagtcaaagaacaagatttagtatcaagaggtagagaaggcattactaccaaaagagaacaagtgcaaataactcaggagaagatgagaaaggaagccgagaaaactgccttgtctacaatagcagttgctactgctaaagccaaagaacaagaaacaatactgagaactagagaaactatggctactagacaagaacaaatccaagttacccatggaaaggtggacgttggaaaaaaggctgaagctgtagcaacagttgttgctgcagtagaccaggcccgagtcagagagcccagagagcctgggcatcttgaagaatcctatgctcagcagaccactttggagtacggatataaggaacgcatttccgccgcaaaggtagctgagcctccccaacgtccagcctcagaaccccacgttgtccctaaagcagtcaagcctagagtaatccaggctccttctgagactcatatcaaaactactgatcaaaagggaatgcacatatcatcacagatcaagaaaactacagatctaacaacggaaagattagtccatgtggataaacgcccccgcacagctagccctcactttactgtttcaaaaatttctgttcctaagacagaacatggatatgaggcatcaatagccggtagtgctattgccacattacaaaaagagttgtcagccacatcttctgctcagaagatcaccaaatcggtgaaggctcctactgtgaagcccagtgagactagagtaagggcagagcccacacccttgccacagttccccttcgctgacacaccagatacttacaagagtgaagctggcgttgaggtgaaaaaggaagtaggggtgagcatcactggcaccaccgtccgtgaagagcgctttgaagtactgcacggacgcgaagccaaggtaacagaaacagcaagagtaccagcacctgttgaaattcctgttactccaccaactttggtctcgggcttaaaaaatgtgactgtcatagaaggtgaatctgtcaccttggagtgccacatctctggatacccatccccgacagtgacatggtacagggaagactaccaaatcgaaagttccattgacttccagataaccttccagagtggaattgctcgtcttatgattcgcgaagcatttgcggaagacagcgggcgatttacttgcagtgctgtaaatgaggctggaaccgtcagcacatcctgctatctggctgtgcaggtgtcagaagaatttgaaaaggaaaccacagccgtgactgagaaatttactacagaagagaaacgctttgttgagtcaagagatgtggttatgactgatactagcctcacagaggaacaagcagggcctggagaacctgccgcgccttactttattacaaaaccagtggtccagaaactggtggaaggtgggagcgtggtgtttggatgccaagttggcggcaacccaaagccccatgtatactggaaaaaatctggtgttcctctaaccactggatacagatacaaagtgagttacaacaaacaaaccggtgaatgcaagctggtgatttctatgacttttgctgatgatgctggagaatacactattgttgttcgcaataagcatggagaaacttctgcatctgcttccttgcttgaagaagctgattatgagttactgatgaagtcccagcaagaaatgctttatcagacacaagtgactgcatttgttcaagaacctaaagttggagaaacagcacctggatttgtatactctgagtatgaaaaagagtatgaaaaagaacaagccttaattaggaagaaaatggccaaagatactgtagtggtcagaacttatgtagaagatcaggaattccatatttcttcctttgaagagagacttattaaagaaattgaatatagaataataaagactacattagaagaacttcttgaagaagatggagaagaaaagatggcagttgacatttctgaatctgaagctgttgaatcaggatttgatttaagaatcaagaattatagaattcttgaggggatgggtgtcacttttcattgcaagatgtctggatatccattaccaaagattgcttggtacaaagatggcaagcgcatcaaacatggagaaagataccaaatggactttctacaagatggcagagctagtctgcgtatacctgttgttcttccagaagatgaaggaatctacactgcatttgccagcaatattaaaggaaatgcaatttgctcagggaaattgtatgtggagcctgctgcaccacttggagctccgacttacattcccacactagagccagtgagcagaatcagatctctctctccacgttcagtgagcaggtctcctatacgcatgtctcctgcacggatgtcacctgcaaggatgtctcctgcacggatgtcccctgcaagaatgtcccctggacgtaggctggaggagacagatgagtcacaacttgagagactatataaaccagtctttgtgttaaaacctgtttctttcaaatgtttagaagggcaaactgccagatttgacttaaaggttgttggtagacctatgccagagacgttctggtttcatgatggccagcaaattgtcaatgactatacccataaagtagtcattaaagaagatggtactcaatcactaattattgtccctgccacacccagtgattctggggaatggactgtggttgcccaaaacagggcaggcagatcttcaatttcagtgattttaactgtggaagctgtggaacatcaggtaaaaccgatgtttgtagaaaaactgaaaaatgtcaatataaaggaaggttcccgacttgaaatgaaagtcagagctacgggtaaccccaaccctgacattgtatggttgaaaaacagtgacatcattgtgcctcataaatatcccaaaatcagaattgaaggaaccaagggagaagctgcccttaaaatcgattccactgtcagccaagattctgcctggtatactgcgactgctattaataaagctggcagagacactacaagatgcaaagtaaatgttgaagttgagtttgcagagcctgagccagagagaaagttaatcatcccacgggggacatatagagcaaaggagattgcagccccagaactggagcccctccatttgcgatatggccaagagcaatgggaagaaggtgatctctatgacaaagagaaacaacagaaaccatttttcaagaaaaaactcacttccttaagacttaagcgctttgggcctgcccactttgaatgcaggctaacacccattggtgacccaacgatggtggtggagtggctccatgatggaaagccacttgaagcagccaacaggctccgtatgatcaatgaatttgggtactgcagccttgattatggcgttgcatattctagagacagtggtatcattacttgcagagccactaacaaatatggaacagatcacacatctgctacccttattgttaaagatgagaaaagtcttgtggaagaatcccaattgcctgaggggaggaaaggcttacagagaattgaagaattagagagaatggctcatgaaggtgcacttacaggtgtaacaacagatcagaaagaaaagcaaaagccagacattgtcttgtacccagagccagttagagtacttgaaggggagactgcaaggttccgctgcagggtaacaggctaccctcagcccaaagtcaactggtacctcaatggacagctcatccgcaaaagcaaaaggttcagagttcgctatgatggtatccattacctggacatcgtggactgcaaatcatatgacacaggtgaagtgaaggtcaccgcggaaaatcctgaaggtgtgatagagcataaagtgaagcttgagattcaacagagggaagattttaggtctgtccttaggagagctcctgaaccaaggcctgagtttcacgtacatgaaccaggaaagcttcagtttgaagtacaaaaagtggatagacctgttgacaccactgaaaccaaagaagttgtgaagttgaaaagggctgaaagaattacccatgaaaaagtgcctgaagagtcggaagagctgcgcagtaaattcaagcgcagaacagaagagggctattatgaagccattaccgctgtggagctcaagtctcgaaagaaggatgaatcctatgaggaactcctcaggaagacaaaagatgaacttctccactggaccaaagagttaactgaagaggaaaagaaagctcttgccgaagaaggcaaaatcacgattccaacttttaaacctgacaagattgaactaagtcctagtatggaggctccaaaaatcttcgaaagaatccagagccaaacagtgggccaaggatctgatgcacacttccgggtcagagtcgtggggaaaccagaccccgaatgtgaatggtacaaaaatggtgtcaaaattgaacggtctgaccggatctactggtactggcccgaagacaatgtttgtgaattggtcataagagatgtgactgctgaggactctgccagcatcatggtaaaagccatcaacatagctggagaaacctccagtcacgcattcttacttgtccaagccaagcaattgatcactttcacacaggaattacaagatgttgttgctaaggaaaaagacactatggcaacctttgaatgtgaaacttcagaaccatttgtcaaagtgaaatggtataaagatggtatggaggttcatgagggagataaatacaggatgcactctgacagaaaggttcacttcctctccatactgaccattgatacgtctgatgctgaagattacagctgtgtacttgtggaagatgaaaatgtcaaaacgactgctaaacttattgttgaaggtgcagttgttgagtttgtgaaagaacttcaggacatagaagttccagaatcatattcaggagaattagagtgcattgtatccccagaaaatatagaaggaaaatggtatcataatgatgtggagcttaaatccaatggcaaatatacaattacatctcgtcgtggacgtcagaacctcacggtcaaggatgtaaccaaggaggaccagggagaatacagctttgtcatcgacgggaaaaagacaacctgtaaattaaagatgaaaccccgccccattgctatcctacaaggacttagtgaccaaaaagtctgtgagggtgacattgttcagcttgaagttaaagtctccttggaaagtgtggaaggcgtctggatgaaagacggccaagaagtgcagcccagtgacagggttcacattgtgatagacaaacaatctcatatgctgctcattgaagacatgactaaggaagatgctggaaattactctttcaccattccagcccttggcctctccaccagtgggcgtgtctctgtctatagtgtggacgtgataacacctctaaaagatgttaatgtgattgaaggcaccaaggctgtgcttgaatgtaaggtgtcagtccctgatgtgacttctgttaagtggtacttaaatgatgaacaaatcaagcctgatgaccgtgtacaggccattgtgaaaggtactaaacagcgactagtcattaaccgaactcatgcttcagacgaaggaccttacaagctgatagttggcagagttgaaaccaactgtaatctctctgtagaaaaaattaaaattatcagaggtcttcgtgaccttacctgtacagaaactcaaaatgtggtgtttgaggttgagctgtcccactctggaattgatgtcctgtggaattttaaggacaaggaaatcaagcccagttctaaatataaaattgaagcacatggaaaaatatataaattgacagttctaaatatgatgaaagatgatgaaggaaaatacacattttacgcgggagaaaatatcacatctggaaaacttactgtggcaggtggggccatctccaagccactcacagatcagaccgtagctgaatcccaggaagctgtgtttgaatgtgaagttgccaacccagattccaaaggcgaatggttgagggatggcaaacacctaccactgactaacaacatcagaagtgagtctgatggccacaaaaggagacttatcattgctgccaccaaattagatgacattggagaatatacctacaaggtggccacctccaaaacatctgccaaactcaaagttgaagctgtcaaaattaagaagactctgaagaacctcacagtgacagaaacacaggatgctgttttcactgtcgagcttacacaccctaatgtcaaaggtgtccagtggatcaaaaatggagttgtgctggaatccaatgaaaagtatgctatctctgtcaaaggaacaatttactctctgaggattaaaaactgtgccatcgtggatgagtctgtttatggcttcaggcttggaaggcttggagccagtgccagactgcacgtggagactgtcaagatcattaaaaagccaaaggatgtgacagccttggaaaatgccactgttgcctttgaagttagtgtttcccatgacactgttccagtaaaatggttccataagagtgtggaaattaagccaagtgacaaacacagactggtctcagaaaggaaagtccacaagctgatgctgcagaacatctccccctcagatgctggggaatacacagctgtggtcgggcaattggaatgcaaagcaaaactgtttgtggagacattacatattacaaaaaccatgaaaaatatcgaggtgcctgagaccaaaactgcctcttttgagtgtgaggtgtcccacttcaatgtcccttccatgtggctgaagaatggtgtggaaattgagatgagtgaaaagttcaagatagttgtgcagggaaaactccatcagctgatcatcatgaacaccagcacagaggactcggcagaatacacatttgtctgtggcaatgaccaagtcagtgccaccctgacagtcaccccaatcatgattacttccatgctgaaagacatcaacgctgaagaaaaagacactattacttttgaggtgacagtgaactatgaaggcatctcttacaaatggttaaagaatggtgtggaaatcaaatcaactgacaagtgccagatgagaaccaaaaagctcacacactcactgaacatcaggaatgttcactttggggatgctgctgactacacctttgtggctggaaaagcaacatcaacagccacactttatgtggaagctcgtcatatagaatttaggaaacacattaaggacattaaggtactggagaagaagcgagccatgtttgaatgtgaagtttctgaacctgacatcactgtacagtggatgaaagatgaccaggaactgcagatcacagacagaataaagattcagaaggagaaatatgtccaccgccttctgatcccatccacccggatgtctgatgctgggaagtacacagtggtggcaggaggcaacgtgtcaactgcaaaactctttgtagaaggcagagatgttcgcatccgaagtattaaaaaggaggttcaggtcattgagaaacagcgtgctgttgttgaatttgaggtcaatgaagacgatgttgatgcccactggtataaagatggcattgaaatcaatttccaagttcaagaacgacacaaatatgtagtggaaagaagaatccaccgaatgtttatctctgagaccagacagagcgatgcaggagaatacacctttgtggcaggaaggaacaggagttctgtcactctctatgtcaatgctcctgaaccgccccaagttctgcaggagctccagcctgtcactgtgcagtctggcaagcctgcccgcttctgtgccgtgatatccggaagaccacagcccaaaatttcctggtacaaggaagagcagctgctttccactggcttcaagtgcaaatttcttcatgatgggcaagagtacacgcttttgctaattgaagccttcccagaggatgcggcagtctatacctgtgaagccaagaatgactatggtgttgccacaacatcagcttcactctcagtggaagttccagaagttgtgtctcctgatcaggaaatgcctgtttatccacctgccatcatcaccccgcttcaggacactgtcacttctgaagggcagccagcccgttttcaatgccgggtttctggaacagatctaaaagtgtcgtggtacagcaaagacaagaaaatcaagccatctcggttctttagaatgactcaatttgaagacacttatcaactggaaattgccgaagcttatccagaagatgaaggaacttacacgtttgttgctagtaatgctgtaggccaagtatcaagcacagccaacctgagtctggaagctcctgaatcaattttgcatgagaggattgaacaagagattgagatggaaatgaaagagttttctagttcttttctgtctgccgaggaagaaggacttcatagcgccgaacttcaattatctaaaataaatgaaacacttgaacttttgtctgaatctccagtttactcaactaaatttgattccgaaaaggaaggcactggcccaattttcatcaaagaagtgtcaaatgctgatataagcatgggggatgtggctacactgtctgtaactgtcattggcatccccaaacctaaaattcagtggttctttaatggagtgctattaaccccttctgctgactacaaatttgtttttgacggtgatgatcatagcctgatcattctgttcaccaaattggaggatgagggagagtatacatgtatggccagtaatgactatggaaagacaatatgtagtgcctatctaaaaattaattccaaaggagagggtcacaaagacactgaaacagaatcagcagtggcaaaatctctggaaaagctgggaggtccttgtcctcctcacttccttaaggagttaaaaccaattcgctgtgctcaagggcttcctgccatctttgagtacacagtggttggagagcctgcccctactgttacatggttcaaagaaaacaagcagctttgcaccagtgtttattacactatcattcataaccctaatggctctggaactttcattgtcaatgaccctcagagggaagacagtggcctctatatctgtaaagcagagaatatgttgggtgagtccacctgtgcagcagagctgcttgtgcttctggaagacacagacatgactgataccccctgcaaagcaaagtccacaccagaggctcctgaggattttccacagacacccttaaagggtcccgcagttgaagcacttgactcagagcaggaaattgcaacgtttgtaaaagacaccattttgaaagctgctttaattacagaagaaaaccagcaactatcttatgagcatattgctaaagccaatgaattgagcagtcagcttcctttgggagctcaggaattgcaatccattttggagcaagacaagctcactcctgaaagcaccagggaatttctttgcatcaatggcagtattcactttcagcctctcaaggaaccatctcccaacctacagctgcagattgtacagtcccagaaaaccttctccaaagaaggtattctaatgcctgaagagcctgagacacaggcagttctatcagataccgagaaaatcttcccaagtgccatgtccatagaacaaattaattcattaacagttgagcctctgaaaactttattagctgaacctgaagggaattatccacagtcttcaatagaacctccaatgcattcttatctaacctctgtggctgaggaagtactttcaccaaaagaaaagacagtatctgacaccaacagagagcaaagagtgactcttcaaaagcaagaggcacaaagtgcgctcatcttgagtcagagcttagctgagggacacgtggagagtctccagagtcctgatgtcatgatctctcaggtaaactatgagcccctagtcccttcagaacactcatgcacagaaggaggtaaaattttgatagaaagtgcaaatccactggaaaatgcagggcaagattctgcggtcagaattgaggaaggcaagtccttaagatttccactagcacttgaagaaaagcaggtactgctcaaagaagagcattctgacaacgtggtgatgcccccagaccaaatcattgagtctaaaagagagcccgtggcaataaagaaagtgcaggaggtacagggaagggaccttctttctaaggaaagcttgctttctggtattccagaagagcagagattaaacctgaaaattcaaatctgccgggctttgcaagcagccgtggccagcgagcagccaggtcttttctctgagtggctaagaaatattgaaaaggtggaggtcgaggctgtaaacatcacccaagagcccagacacatcatgtgcatgtaccttgttacttcggcaaagtctgtaacagaagaagtaaccatcattattgaagatgttgatcctcaaatggctaacctgaaaatggaacttagggatgctttgtgtgctattatatatgaggaaatagacatcctaacagctgagggtcctagaattcagcaaggagccaaaacaagtttgcaagaagaaatggattctttttcaggttcacagaaggttgaacccattactgaaccagaagttgaatctaaatatctgatctcaactgaagaggtcagttattttaacgtgcaaagtagggttaaatatttggatgccacacctgtcactaaaggggttgcttcagctgttgtctctgacgaaaaacaagatgagagtctgaaaccatcagaggaaaaagaggagtcttcctctgaaagtggtactgaggaggttgctacagtaaagatacaggaagctgagggtggcttaatcaaagaggatggccccatgatacatacacctttagtggacactgtttctgaggaaggtgatattgtacacctcacaacatccataacaaatgctaaagaggtgaattggtattttgagaataaactggtgccttcagatgaaaagttcaagtgtttacaagatcaaaatacatatacgctagtcatcgacaaagtaaataccgaagaccatcaaggagagtatgtctgtgaggccttgaatgacagcggaaaaacagcaacttcagccaaactcactgtagtaaaaagagctgccccagtgatcaagaggaaaatcgaacccctggaagtagcactgggccacctagccaaattcacctgtgagatccaaagtgctcccaatgtccggttccagtggtttaaagctggccgagaaatttatgagagtgacaagtgttctattcgatcttcaaagtatatctccagccttgaaatcctgagaacccaggtggttgactgcggcgagtatacatgcaaagcttccaatgagtatggcagtgtcagctgtacagccacactaactgtgacagtgcctggaggtgaaaagaaagttcgcaaattacttccggaacgtaaacctgaaccaaaggaagaagttgttctgaaaagcgttctaagaaaaagacctgaagaagaagaacctaaagtagaacctaaaaaactagaaaaagttaaaaaacctgcagtaccagaaccaccacctccaaaacctgttgaagaggttgaagtacctactgttacaaaaagggaaaggaagattcctgaaccaacaaaagtgcctgaaatcaagccagcaatacctctccctgcacctgaaccgaaaccaaagcccgaagcagaagtgaaaacaatcaaaccacctcctgtggaacctgaaccaacccccatcgctgccccagtaacagtgccagtggttggaaagaaagcagaagccaaagcacctaaggaagaggctgccaagccaaaaggtcctatcaaaggtgtacccaaaaagactccttcaccaatagaagccgaaaggagaaagttaaggccaggaagtggtggagagaaacctcctgatgaagccccgttcacctaccagctaaaggctgtgccactgaagtttgtgaaagaaatcaaagacatcatcttgacagaatcagagttcgttggctcttcagcaatctttgaatgtttggtctccccttccactgcaattacaacctggatgaaagacggtagcaatatccgtgagagtcccaagcacaggtttattgcagatggtaaagacagaaagctgcacatcattgatgttcaactttccgatgctggtgaatacacctgtgttttacgtttgggaaacaaagaaaagacctccacggctaaacttgttgtagaagaacttcctgtgcgttttgtaaaaacactggaagaggaagtcacagtggtcaaaggacagccattgtacttgagctgcgagttaaacaaagagcgtgacgtggtctggaggaaggatggcaagattgtggtggagaaacctggccgaattgtgccaggcgtcattggcttgatgcgggctctgaccatcaacgatgcagatgacacagatgctggaacatacacagttactgtggaaaacgccaacaacctggagtgttcatcttgcgtaaaagtagtagaagtcattagagattggctggtgaaacctatacgagaccagcatgtgaaacccaaggggacagctatttttgcctgtgatatagcaaaagatactccaaacattaagtggttcaaaggatatgatgaaatccctgcggaaccaaatgataagactgaaatactgagagatggaaatcatctgtacctcaaaattaagaatgctatgccagaagatattgctgagtatgcagtggaaattgaaggaaaaagataccctgcaaagctgacacttggagagcgtgaagttgaactgcttaaaccaatagaggacgttaccatttatgagaaagaaagtgcaagctttgatgcagaaatctcagaggcagacattcctggacaatggaaactgaaaggagaacttctaaggccctcacctacttgtgaaatcaaagcagaaggtggaaaacgcttcttaactttgcacaaagtcaaactggaccaagctggtgaagtcctctaccaggcccttaatgcaattacaactgccattttgacagtaaaagaaatcgaacttgactttgctgtgcccctgaaggatgtcactgttccagaaaggcgacaggctcgattcgaatgtgtcctcacccgagaggcaaatgttatatggtccaaaggacctgatataattaagtcatctgacaaatttgatatcatcgctgatggaaagaaacatattcttgttattaatgattctcaatttgatgatgaaggggtctatactgctgaggtggagggcaagaagacctcagctcggttgtttgtcacaggtataagactgaaattcatgtcacctcttgaagatcaaacagtaaaagaaggtgaaacagcaacttttgtttgtgaactttctcatgaaaaaatgcatgtagtctggttcaaaaatgatgccaaactccatacaagcagaacagtactcatctcttctgagggcaagactcacaaattggaaatgaaagaagtgacattggatgatatatctcagataaaagctcaagtcaaggagctgagctccacagcacagctgaaggtcttagaggccgatccctacttcactgtgaaattacatgacaaaactgcagtggagaaggatgagattactttgaagtgtgaagtgagcaaagatgtaccagtgaaatggttcaaagatggtgaagagattgtcccttcacccaaatattctatcaaggcagatggcctgcgccgcatcttaaaaatcaaaaaggcggaccttaaagataaaggcgaatatgtgtgtgactgtggcacagacaagaccaaggcaaatgttactgttgaggctcgactaataaaagtggaaaagcctctgtacggagtagaggtgtttgttggtgaaacagcccactttgaaattgaactttctgaacctgatgttcacggccagtggaagctgaaaggacagcctttgacagcttcccctgactgtgaaatcattgaggatggaaagaagcatattctgatccttcataactgtcagctgggtatgacaggagaggtttccttccaggctgctaatgccaaatctgcagccaatctgaaagtgaaagaattgcctcttatcttcatcacacctctcagtgatgttaaagtcttcgagaaagatgaggctaagtttgagtgtgaagtatccagggagcccaaaacattccgttggctaaaaggaacccaggaaatcacaggtgatgacagatttgagcttataaaggatggcactaagcattcaatggtgatcaagtcagctgcttttgaagatgaagcaaaatacatgtttgaagctgaagataagcacacaagtggcaaactgatcattgaaggaatccggctcaaattcctcacccctctcaaagatgtaactgccaaagagaaggaaagtgctgtatttactgtggagttatctcatgataacatccgagttaaatggttcaagaatgaccagcgcctacacaccaccaggtcggtctcaatgcaagacgaagggaaaactcattcgatcacattcaaagacctgtctattgatgacacctcccaaattagagtagaagctatggggatgagttcagaagctaaactcactgtgcttgagggagacccatattttacaggaaaacttcaagattatactggtgtagagaaagatgaagttattctacagtgtgaaattagcaaagcagatgcaccagtgaaatggtttaaggatgggaaggaaataaagccatccaaaaatgctgttattaaggcagatggcaagaaacgcatgctaatcctaaagaaagccttgaaatcagatattggacagtacacctgtgactgtgggacagataagacctcaggaaaacttgacattgaggatcgggaaattaaactggtgcgacccctgcacagtgtggaggtgatggagactgagacagcacgctttgaaaccgaaatctctgaagatgatatccacgccaactggaaactcaagggagaggccctactccaaacacctgattgtgaaattaaggaagaaggcaaaatacactcccttgttttgcacaactgtcgcctggaccagacgggtggggtggatttccaagctgccaatgttaaatctagtgcccacctccgagttaagccacgagtaattggtcttctgaggcctttaaaggatgtcaccgtgactgcaggggaaacagccaccttcgactgcgagctctcctacgaagatatcccagtggaatggtatctcaaagggaagaaactagagcccagcgataaggtggtcccacgttcagaaggaaaagttcatacacttactctgagggatgtaaagttagaagatgctggggaagtccaactaacagcaaaagatttcaaaactcacgccaacctctttgtgaaagaacccccagttgaattcactaagcctcttgaggaccagacggtcgaagagggagccactgcagtgctggagtgtgaagtctccagagaaaatgctaaggtgaaatggttcaaaaatgggacagaaatcctcaaaagcaagaagtatgaaattgttgctgatggcagggtcagaaaacttgttatacatgactgtaccccagaggatattaaaacatacacttgtgatgctaaggattttaagacttcctgtaacctgaatgtcgtgcctcctcatgtggaattcttaagaccactcaccgaccttcaagttagagaaaaagaaatggctcgatttgagtgtgaactttcccgagaaaatgctaaggttaagtggtttaaagatggtgctgaaattaaaaagggcaaaaaatatgacatcatatccaagggagcagtgcgcattcttgtcatcaacaaatgtctactggatgatgaagctgaatattcctgtgaagtaaggacagcgagaacttctggcatgctgacagttctggaagaagaagctgtctttaccaaaaatcttgccaacattgaagttagtgaaacagacactataaaactggtttgtgaagtctccaaacctggcgcagaagtgatttggtataaaggggatgaggagatcattgaaacaggaagatatgaaatactgactgaaggacggaagagaatcctggtcattcagaacgctcaccttgaggatgctggcaactacaactgtcgactcccaagctctcgaaccgatggcaaagtcaaagtacatgaactggctgctgaatttatctcaaagcctcaaaaccttgaaatacttgaaggagaaaaggctgaatttgtctgctctatatcaaaagaaagctttccagtccagtggaagagggatgataagacacttgaatctggagataaatatgacgttattgctgatggtaaaaagagggtcctagttgtgaaagatgccacattacaagatatgggcacttacgttgtcatggtaggggccgccagagcagcagctcacttgacagtcattgaaaaactcaggatcgtagttcctcttaaggacacccgggtgaaggaacaacaggaagttgtcttcaactgtgaagtcaatactgaaggtgccaaagccaaatggttcagaaatgaagaagctatatttgatagttcaaaatacatcattctccaaaaagacctagtctacaccctcagaattagagatgcacacttagatgaccaagccaactataatgtgtctttgaccaatcacagaggtgaaaatgttaaaagtgcagccaatctaatagtagaagaggaagaccttaggattgttgagcctcttaaagatattgaaacaatggagaagaaatctgtcacattctggtgcaaggtgaatcgtctcaatgtaacactgaagtggaccaaaaatggtgaagaagtgccttttgacaaccgtgtctcatacagagttgataagtacaagcacatgttaaccattaaagactgtggcttcccagatgaaggtgaatacattgtcactgctggacaagataaatctgttgctgagcttctcatcatagaagccccgacagaatttgtggaacacttggaagatcagacagtcactgagttcgatgacgctgtcttctcctgccagctctccagagagaaagccaatgtaaaatggtacagaaatgggagagaaatcaaagaaggcaaaaaatacaaatttgaaaaagatggaagtatacacagactcattataaaagattgcaggctggatgatgagtgtgaatatgcttgcggggtagaagacaggaagtctcgtgctagactttttgtggaagaaattcctgttgagatcatcaggcctccacaagatattcttgaagcccctggtgctgatgttgtctttttagcagaactcaataaagataaggtggaagtccaatggctaagaaataacatggttgttgtccagggtgataaacaccagatgatgagtgaaggaaagatacatcgactacagatttgtgatattaagccccgtgaccagggtgaatacagatttattgccaaagacaaagaagccagagctaagcttgaactggcagctgcaccaaaaatcaagacagctgaccaagaccttgtggttgatgttggcaagcctctgacaatggtggtgccatatgatgcctaccccaaagcagaagctgaatggtttaaagaaaatgaacctttatctacaaaaaccattgatactacggctgaacaaacttctttcagaattttagaagccaagaaaggagacaaagggaggtataaaattgtgcttcagaacaaacatggaaaagcagaaggattcatcaatttaaaagttattgatgttcctgggccagtacgtaacttagaagtgacagaaacatttgatggtgaagtgagccttgcttgggaagaacctttaactgatggtggaagcaaaatcataggttacgttgttgaaagacgtgacattaagagaaagacctgggttctggccacagaccgtgcagagagttgtgagtttactgtcactggtctacagaaaggaggagttgagtacctattccgtgtgagtgcaagaaacagagttggcactggtgagccagtagaaactgacaatcctgtagaagcaaggagtaaatatgatgttccaggccctcctttgaatgtaaccatcactgatgtgaatcgatttggtgtctcactgacatgggaaccaccagagtatgatggaggtgctgagatcacaaactacgtcattgaattaagagacaagacttctatcaggtgggatactgccatgactgtgagagctgaagacctgtctgcaactgttactgatgtggtagaaggacaggagtacagtttccgagtgagagcccaaaatcgaattggagttggaaaaccaagtgcagccacacccttcgtcaaagttgctgatccaattgagagaccaagtcctcctgtaaacctaacttcctcagatcagactcagtcatcagttcagctcaaatgggaacctcctctgaaagatggaggaagcccaatattaggctatataattgagcgatgcgaagaaggaaaagataattggattcgttgcaatatgaaacttgtccctgaactgacttacaaggttaccggattggaaaaaggaaataaatatttatatagagtatctgcagaaaataaagctggtgtttcagatccatctgaaattcttggtcctctcaccgctgacgatgcatttgttgaaccaacaatggatttaagtgcatttaaagatggtctggaagttattgtcccaaatcctatcacgatcctggttccaagtacaggctatccaaggccaactgcaacctggtgttttggagataaagtactagaaacaggggaccgggtgaaaatgaagaccttgtctgcctatgccgaacttgtcatttctccaagtgaacgttcagacaagggcatttatacactgaaattagaaaaccgtgtgaaaacaatttctggggaaattgatgtcaatgtaattgctcgcccaagtgcacccaaagaattgaaatttggtgatataaccaaggactcagtacatttgacttgggaaccacctgatgatgatggaggaagtccgttaactggatacgttgttgaaaaacgagaagtcagccggaaaacatggactaaagttatggactttgtgactgatctagaattcacagttcctgatcttgttcaaggaaaagagtacttatttaaagtttgtgctcgtaacaaatgtggccctggagaacctgcatatgttgatgaacctgtaaatatgtcaactcctgcaacggtacctgacccaccagagaatgttaaatggagagatcgaacagccaatagcatcttcttaacatgggatccacctaaaaatgatggtggttcacgcatcaaaggatatatagttgaaagatgtccacgtggttctgataaatgggttgcctgtggagaacctgttgcagaaacaaaaatggaagtgacaggtcttgaggaaggcaaatggtatgcctaccgcgtgaaggccttaaacaggcagggtgctagcaaaccaagcagacccacagaggaaatccaggctgtggacacacaagaggccccagaaatcttcctcgatgtgaagctccttgctggtctcactgtaaaagctgggaccaagattgaacttcctgccaccgtaaccggaaaacctgaacctaaaataacttggacaaaggctgatatgattctgaagcaggacaaaagaattaccattgaaaatgtccctaagaaatccacagtgactattgttgatagtaagagaagtgacactggcacatatatcattgaggctgtgaatgtgtgtggccgggccactgctgtggtggaagtgaacgtcttagataaacccggaccaccagctgcctttgacatcacagatgtaaccaatgagtcatgtcttctaacatggaacccaccacgcgatgatggtggatctaagatcacaaactatgttgtggagagacgagcaactgatagtgaagtgtggcacaagctctcatccaccgtcaaggatacaaacttcaaggccaccaaattaatccccaataaagagtacatcttcagagttgctgcagaaaacatgtatggtgttggtgaaccagttcaggcctctccaataacagccaaatatcagtttgatccacctggtcctccaactcgcctagaaccttctgatatcactaaagacgcagtgactctcacatggtgtgagccagatgatgatggtggcagcccaatcacaggatactgggttgaaagactggatcctgatacagataaatgggttagatgcaataagatgccagtaaaggacacaacatacagagtgaaaggtctcactaataagaaaaaatacagattccgtgtgttggctgaaaatcttgctggacctggaaaaccaagcaaatcaactgaaccaatcttaataaaggatcccatagatcctccatggccccctggaaaaccaactgtaaaagatgtaggcaaaacatcagtaaggttgaattggacaaaaccagaacatgatggaggtgcaaagattgagtcttatgtcattgaaatgctgaagactggaacagatgagtgggtcagagtggcggaaggggttcccaccactcagcacttgctcccagggctcatggaaggacaggaatactcattccgagttagagctgtgaataaggctggggaaagtgaacccagtgaacccagtgaccctgtgctttgccgggagaagctatatcctccatcaccaccacgctggcttgaagttattaatatcacaaaaaatacagcagacctaaaatggacagttcctgagaaagatggagggtcccccatcaccaactacattgtggaaaagagagacgtcaggcgaaaaggctggcaaacagtggataccactgtcaaggacaccaagtgcacagtcaccccactgactgagggctctttatatgtgttccgagttgctgcagaaaatgctataggacaaagcgactacaccgaaattgaggactctgtgctggccaaagacacctttaccactcctggaccaccctacgccctggcagtggttgatgtgacaaaacgacatgttgacctaaagtgggagccacctaaaaatgatggtggaagaccaatacagagatatgtcattgagaagaaagaaaggttaggtacccgttgggtgaaagctggaaagactgcaggacctgactgtaacttcagagtaactgatgtcatcgaaggaacagaggtccagtttcaggttcgggctgaaaatgaagctggagttggccacccaagtgaacccacagaaatcctatccattgaagatccaacaagtcctccctcaccaccccttgacctacatgtgactgatgctgggagaaaacacattgccattgcttggaagcctccagagaaaaatggtggaagtcctatcataggataccatgttgaaatgtgtccagtaggcactgagaaatggatgagagttaattctcgcccaataaaggacttgaaattcaaggttgaagaaggtgttgttcctgacaaagaatatgtcctgagagtgagagcagtcaatgctattggtgtcagcgagccatctgaaatctctgaaaatgtggttgccaaagacccagactgcaagccaacaattgacctggagactcatgacattattgttattgaaggtgaaaagttaagcattcctgttcccttcagagctgtcccagttccaactgttagttggcataaagatggcaaagaagttaaagcaagtgatagattaacaatgaagaatgatcacatctctgcacaccttgaagttcccaagagtgtccgtgcagatgccggaatttataccattacactggagaataagctcggctcagcaacagcctcaatcaatgtcaaagtcataggcctacctggaccatgcaaagatattaaagcaagtgacattaccaagagttcttgtaagttaacttgggaacctccagaatttgatggtggaaccccaattcttcattatgtcctggagcgcagagaagctgggaggagaacatatataccagtcatgtctggtgagaacaaactgtcatggactgtgaaggatctcataccaaatggtgaatacttcttccgtgttaaagcagtcaacaaggttggtggaggagaatatattgaactgaaaaatccagtcattgctcaagatccaaagcaaccccctgatccacctgtagatgtagaggttcataatcctacagcggaggcaatgactattacatggaagccacctttgtatgatggagggagcaagataatgggctacatcatagagaagattgctaagggtgaagaaaggtggaagagatgcaatgaacacctggtaccaatcctgacctatacagcaaaaggacttgaagaggggaaagagtaccaattccgtgtgcgagcagagaacgccgcgggtattagtgaaccttctcgggctactcctccaaccaaagctgtagatcccattgatgcccccaaagtcattctgagaacaagcctagaagtgaaacgaggtgatgaaatagcacttgatgcaagtatttctggatcaccttacccaactattacatggataaaggatgaaaatgttattgtaccagaggaaattaagaagcgtgcagcacccttggttaggagaaggaagggtgaagttcaagaagaagaaccatttgtcctgcctctgacacagcgtttgagtattgacaacagcaaaaagggagaatctcagctacgcgtccgagattctctccgacctgaccatggtctgtatatgatcaaagttgaaaatgaccacggtattgcaaaagctccttgtactgtcagtgtgttagatacaccgggaccaccaatcaactttgtatttgaagatatcagaaagacctcagtcctttgtaaatgggaaccaccccttgatgatggtggcagtgaaatcataaactacactttggaaaagaaagacaagacaaaacccgactcagaatggattgttgtcacttcaacacttagacattgcaaatattcagtaacaaaactgattgaaggaaaagagtacctcttccgtgtaagagctgaaaacagatttgggccaggtccaccatgtgtttcaaagccacttgtggctaaagatccatttggaccacctgatgcaccagataagcccattgtggaagatgttaccagcaacagtatgctagtgaaatggaatgaaccaaaagataatggaagccccattttgggttactggcttgaaaaacgtgaagttaacagtacacattggtctcgtgtcaacaaaagccttctgaatgccttgaaagccaatgtagatggcttattagaaggactcacctatgtcttcagagtatgtgctgaaaatgcagctggacctggaaagttcagtccaccttcagatcccaaaacagcacatgatccaatctctcctcctgggccacctatcccaagagtcactgacacaagctctacaactattgaactagaatgggaacccccagctttcaatggtggtggggaaattgttggctattttgttgataagcagttggttggcacaaatgaatggtcacgctgcacagagaagatgatcaaggtccgtcagtacaccgtcaaagaaatccgagagggtgctgattacaaacttcgggtgagtgctgtcaatgccgcaggggaaggaccgcctggagaaacacaacctgttactgtggctgaaccacaagagcctccagctgtggaactggatgtttctgtcaagggtggaatacaaataatggctgggaagactcttagaattccagctgtggtgactggtcgccctgtacctacaaaagtatggaccaaagaagaaggggagctggataaagaccgtgttgtaatagacaacgttggaaccaaatctgaactaattatcaaggatgcactgcgaaaagaccatggcagatatgtgattacagctacaaatagctgtggttccaaatttgcagcagccagggtagaagtttttgatgtccctggtccagttcttgacttaaaacctgttgtaacaaacagaaaaatgtgtctacttaactggtctgatccagaagatgatggaggaagtgaaataacaggctttatcattgaaagaaaagatgccaagatgcatacttggagacaaccaatagagactgagagatctaaatgtgacatcacaggtctgcttgagggacaagaatataagttccgtgttattgccaagaacaagtttggctgtggccctcctgttgaaataggaccaattcttgcagttgatccactaggtcctccaacatctccagagaggctcacatacactgaaaggacaaagtccactatcacacttgactggaaagagccccgcagtaatggtggcagtcccatccaaggatatatcattgaaaaacggcgtcatgacaaacctgactttgaaagagttaacaagcgactctgcccaaccacatcttttctggttgaaaatcttgatgaacaccaaatgtatgagttccgtgtcaaagctgtcaatgaaattggtgaaagtgaaccatccctacctcttaatgtagtcatacaagatgatgaagtgcctccaactattaagttgcgtctgagtgttcgaggagacactatcaaagttaaggcaggagagcctgtccacatccctgcagatgtgacaggccttccaatgcctaagattgaatggtccaaaaatgaaactgtaattgaaaaacccactgatgcacttcagataaccaaggaagaggtatcccgaagtgaggcaaaaactgagcttagcattcccaaagcggtccgggaggacaaaggcacttacacagttactgcttccaatcgccttggctcagtgttccgaaatgttcacgttgaagtatatgaccgcccatccccaccaagaaatcttgctgttactgacattaaagctgaatcttgctacttgacatgggatgcccctcttgataatggtggcagtgaaatcacccattatgttattgacaaacgtgatgcaagtaggaagaaagcagaatgggaggaagtcaccaacactgctgtagagaaaagatatgggatctggaaacttatccccaatggtcagtatgagttccgagtcagggcagtgaataaatatggaatcagtgatgagtgcaaatcagataaagtagtcattcaagatccttatcgccttcctggacctccaggaaaaccaaaagttttggcacgcaccaaaggatcaatgctagtgagctggactcctcctttggacaatggtggctctccaattactggctactggctggagaaaagagaagagggaagtccttattggtcacgtgttagccgagcaccaataaccaaagtgggattgaaaggcgtggaatttaatgttcctcgtttgcttgaaggcgttaaataccagttcagagccatggcaataaatgctgcaggaattggtcctcccagtgaaccatcagatccagaggttgcaggagatcccatatttccaccggggccaccttcttgcccagaagttaaagataaaacgaagtcaagcatctcactaggatggaaacctccagccaaagatggtggcagcccaatcaaaggatacattgtagaaatgcaagaagaaggtactactgactggaaaagagtaaatgaaccagacaaacttataactacctgtgaatgtgtggtgcctaatctgaaagagctcaggaagtacagattcagagtgaaagctgtcaatgaagctggtgaatctgaaccaagtgatacaactggggagatccctgccactgatattcaagaggaaccagaagttttcattgacattggagcacaggactgtctggtttgtaaagctggctcacagattaggattcctgctgtcatcaagggacgcccaacaccaaaatcatcttgggaatttgatggaaaggcaaagaaagcaatgaaggatggagttcatgacatacccgaagatgcacagctggagactgctgaaaactcctcagtaattattattccggagtgtaaacgatctcatacaggcaaatacagcatcacagccaagaataaagcaggacaaaagactgcaaattgcagagttaaagtcatggatgtaccaggcccacccaaagatctgaaagtcagtgatatcacaaggggtagttgcagactttcatggaagatgccagacgacgatggaggagacaggatcaaaggctatgttattgagaagaggactattgatggaaaagcctggaccaaagtcaatccagactgtggaagcaccacatttgtagtgcctgatctcctctctgaacagcaatatttcttccgtgtgcgagcagaaaaccgttttggtattggcccacctgtggaaaccattcagaggaccactgccagagatccgatatatcctcctgatcctcctattaaactcaagattggcctcatcacaaagaacacagtgcatctgtcatggaaacccccgaagaatgatgggggctcccctgttacccactatattgttgagtgccttgcatgggaccctactgggacaaagaaagaagcctggaggcagtgcaataagcgtgatgtggaagaactgcaatttactgttgaagacctagtagaaggtggggaatatgaattccgagtcaaagctgtcaatgctgcaggagtcagcaagccttcagccactgttgggccctgtgactgtcaaagaccagacatgccaccatcaattgatctaaaagaattcatggaggttgaagaaggaaccaatgttaacattgtggccaaaattaaaggtgtgccattcccgacactaacctggtttaaagctcctccaaagaagcctgataacaaagaacctgttctctatgacacccatgtcaacaaactggtggtagatgatacttgcactttagttattccgcagtctcgcaggagtgacactggcttatataccatcacagctgtaaataatctgggaacagcatcaaaggagatgagactgaatgtcctgggtcgtcctggccctccagtgggacccataaaatttgaatctgtttcagcagatcaaatgacactatcttggtttccacctaaagatgatggtgggtctaagattacaaactatgtaattgagaaaagagaagctaacaggaagacatgggtccatgtctccagtgaacctaaggagtgcacgtacacgattcccaaattgctagaaggccatgaatatgtattccgaatcatggcccagaataaatatggcattggagaacctcttgacagtgaacctgaaacagcaagaaacctcttctctgtccctggagcaccagataaaccaacagttagcagcgtgactcgtaactccatgactgtcaactgggaagagccagaatatgatggaggctctcctgtgacagggtactggctggaaatgaaagacaccacttcaaagagatggaagagagttaaccgagatcctatcaaagccatgactttgggtgtttcttataaagtgactggtcttattgaaggttccgactatcaattccgggtatatgcaatcaatgctgctggcgtgggtccagcaagtctgccatcagacccagcgactgctagagatccaattgcccctcctggtcctccatttcccaaagtgacagattggactaaatcatctgcagatctggagtggtctcccccactaaaagatggtggatccaaagtaactggatacatcgttgaatataaagaagaaggaaaagaagaatgggaaaagggtaaagataaagaagtgagaggaacaaagctcgttgtgacaggattaaaggaaggagcattctacaaatttagagttagtgcagtcaacattgctggcattggagaacctggagaggtcacagatgtcattgaaatgaaggacagacttgtttcacctgaccttcagctagatgccagtgtcagagatagaattgttgtccatgctggaggggtgatccgaatcattgcctatgtgtctggaaagcctcctccaaccgtcacctggaacatgaatgaaagaaccttacctcaagaagccaccattgagaccacagccattagctcatccatggtcatcaagaactgccagaggagccatcaaggcgtctattctcttcttgccaaaaatgaagccggagaaagaaagaagacaattattgttgatgtattagatgttccaggtcccgttggaacaccattcctagctcacaacctaaccaatgagtcctgcaaactgacatggttttctccagaagatgatggaggctctccaatcaccaattatgtcattgaaaagcgtgaatctgaccgcagagcatggaccccagtgacatatacagttacccgacaaaatgctactgtccagggtctcattcaaggaaaagcctactttttccgaattgcggctgaaaatagtattggcatgggtccatttgttgagacatcagaggcacttgttatcagagagccaataactgtaccagagcgtcctgaagacctggaagtcaaagaagttactaaaaatactgtaactttgacttggaatcctcctaagtatgatggtgggtcagaaattattaactatgtcctagaaagtcggctcattgggactgagaagttccacaaagttacaaatgacaacttgcttagcagaaaatacactgttaaaggcttaaaagaaggtgatacctatgagtaccgtgtcagtgctgtcaacattgttggacaaggcaaaccatcattttgcaccaaaccaattacttgcaaggatgagctggcacccccaacgcttcacctcgacttcagagataagctcacgattcgagttggtgaagcttttgccctcactggccgttactcaggcaaaccaaagcctaaggtttcctggttcaaagatgaagctgatgtgctggaagatgatcgcactcatataaagactacaccagcaacacttgctttagagaagatcaaggccaaacgttcagattccggcaaatactgtgtggttgtggagaacagtacaggctctaggaaaggtttctgtcaagttaatgttgttgaccgtcctggaccaccagtaggaccagttagttttgatgaggtgaccaaagattacatggttatctcttggaagcctcctttagatgatggaggcagtaaaatcaccaattatattattgagaagaaggaagtgggtaaagacgtctggatgccagtgacatctgcaagtgctaaaacaacatgcaaagtttctaaactacttgaaggaaaagattatattttccggatacatgctgaaaatctgtatggaataagtgatcctctggtgtctgattcaatgaaagccaaagatcgtttcagggttcctgatgcacctgatcagccaattgttacagaagttaccaaagactctgcattagtaacctggaataagccacatgatggaggaaaacccatcacaaactacatcctggaaaagagagaaactatgtctaaacgatgggctagagttaccaaagatcctattcatccatacactaaatttagggttcctgatcttctagaaggatgtcagtatgaattccgggtttctgcagaaaatgaaattggtattggagatccaagcccaccatccaaaccagtctttgctaaagatccaattgctaaaccaagtccacctgttaatcctgaagcaatagatacaacatgcaattcagtcgatctaacttggcagccaccacgtcatgatggtgggagcaagattctgggttatattgttgagtaccagaaagttggagatgaagagtggagaagagccaatcacacccctgagtcatgtcctgaaactaaatataaagtcaccggtcttcgggacggtcaaacctataagtttagagtgttagcagtcaatgcagctggtgaatcagatccagctcatgttccggagccagtcctagtaaaagacaggcttgaaccccctgagttgattcttgatgccaacatggcaagagaacaacacattaaagttggtgatactctaagacttagtgccatcatcaaaggagtgccattcccaaaagtaacttggaaaaaagaagacagagatgctccaactaaagcaagaattgatgtgactccagttggtagcaagcttgaaattcgtaatgctgcccatgaagatggtggaatttattctttaacagtggagaatccagctggttcaaaaactgtctcagtaaaagtacttgtattagataaacctgggccacctagagatctggaagtcagtgaaattaggaaagattcatgttaccttacttggaaagaaccactggatgatggtggttctgttattaccaattatgtggttgagaggagagatgttgccagcgcccagtggtcacctctctcagctacatcaaagaaaaagagtcacttcgctaagcatctgaatgaaggcaaccagtacctcttccgagtagctgcggagaaccagtatggacgtggtccttttgttgaaacaccaaaaccaatcaaggctttggatcctctccatcccccagggccacccaaggacctgcaccatgtagatgttgacaagactgaagtctccctagtctggaataagccggatcgtgatggtggttctccaatcactggatatttggtagaatatcaagaagaaggcacccaggactggattaaatttaagactgtgacaaacttagagtgtgtggttactggactacaacaaggaaagacctatagattccgtgtaaaagctgaaaacattgtgggtcttggtctccctgacacaactatcccgatagaatgtcaagaaaaactagtgcctccatccgtggagctagatgtgaaattaattgaaggtcttgtggtaaaggctggaaccacagtcagattccctgctattataagaggtgtgcctgttcctactgcaaagtggacaaccgatgggagtgagattaaaaccgatgagcactacacagttgaaacagacaacttctcatcagtacttaccattaagaactgcttaaggagagacactggggaatatcaaatcacagtttccaatgcagccggtagcaaaacagtagccgtacatcttactgttcttgatgttcctgggccaccaacaggtcctattaatattctggatgttactcctgaacacatgactatctcatggcagccacctaaggatgatggaggaagccctgtgataaattatattgttgagaaacaagatacaaggaaagacacgtggggtgttgtctcttccggaagcagtaagacaaagctgaaaatcccacatctgcagaagggctgtgaatatgttttccgagttagagcagagaataagataggtgttggtcctccccttgactccacacctactgttgctaagcataaatttagtcctccgtctcctcctggtaaaccagtggttactgacattactgaaaatgcagcaacagtgtcttggaccctgccaaaatctgatggtggcagtccaataactggctactatatggaacgtcgagaagtaactggcaaatgggtgagggtcaacaaaacacctatcgctgacctgaagttcagagtgactggactctatgaaggaaatacatatgagtttagagtttttgctgaaaatcttgcaggactaagcaaaccatccccaagttctgatccaataaaagcttgccggcccatcaaaccacctggaccacctattaatcctaaactgaaagacaagagcagagaaacagctgatttggtgtggacaaagcctctcagtgatggtggtagccccattctaggatatgtagtggaatgtcagaaacctggcacggcacaatggaacaggattaataaagatgaactcattaggcaatgtgcctttagggtacctggactaattgaaggaaatgagtacagattccgtataaaggcagctaatattgtaggagagggtgagccaagagaactagcagaatctgtgattgcaaaagatatccttcatcctccagaagtagaacttgatgttacttgtcgtgatgttattaccgtgagagtaggccaaactatccgcattctagctcgagtcaaaggcagacctgaaccagacataacttggactaaggaaggcaaagtattggtccgagaaaagagggtggaccttattcaggatctacctcgtgttgagttacaaattaaagaagctgttagagctgatcatggcaagtatatcatctcagctaagaacagcagtggacatgcccaaggttcagccatcgttaacgtccttgacagacctgggccttgccagaatttgaaggttaccaatgtaaccaaagagaactgtacaatttcttgggaaaacccactagataatggtggctcagaaataacaaacttcatagtagaatatcgcaaaccaaaccagaaaggctggtcaattgttgcatcagatgtcactaaacgattaatcaaggccaaccttttagccaacaatgaatactatttccgagtttgtgcagagaataaagtaggtgttgggccaaccatcgaaacaaaaactcccattctggctattaaccctattgacagaccaggtgagcctgaaaaccttcacattgcagataaaggaaagacatttgtctatctaaagtggcggaggcctgactatgatggtggcagtccaaatctgtcatatcatgttgagagaaggcttaagggctccgatgactgggaaagagtgcataaaggaagcattaaagaaactcactacatggttgacagatgtgttgaaaaccagatttatgagttcagagtgcaaacaaagaatgaaggtggggaaagtgactgggtgaagacagaggaagttgttgtgaaagaagacttacaaaaaccagtacttgatctgaaattaagtggggtcctaactgtcaaagcaggggacaccattaggcttgaggcaggggttagaggcaaaccattcccagaagttgcatggaccaaggacaaagacgctacagacttaacaagatcaccaagggtcaagattgatacccgtgctgattcatctaaattttctcttactaaagcaaagcgaagtgatgggggtaaatatgtagttacggcaactaacacggctggcagttttgtggcctatgccactgtcaatgttttagataagcctggtcctgtgagaaatctgaaaattgttgatgtgtccagtgataggtgtactgtttgctgggatccaccagaagatgatggtggctgtgaaatccaaaattatattctagaaaaatgtgagacaaagcgaatggtttggtctacctattctgctactgtcttgacacctggtactacagtaacacgtctcatagaaggaaatgaatatattttcagagtccgtgcagaaaataaaataggcacagggcctccaacagaaagtaaaccagtcatagccaaaaccaagtatgataaacctggtcgccctgatcccccagaagtcactaaagtaagcaaagaagagatgactgtggtttggaatccacctgaatatgatggtggaaagtctataactggatactttttggagaaaaaggaaaagcattcaacacgatgggtccctgtcaacaagagtgcaatccctgagagacgtatgaaagtacagaatctcctcccagaccatgaatatcagttccgtgtcaaggcagaaaatgaaattggaattggagaaccaagcttgccttcaagaccggtggtggcaaaagaccccatagagccacctggtccaccaaccaatttcagagtggttgatacaaccaaacattccataactcttgggtggggaaaaccagtctatgatggtggtgcaccgatcattggatatgttgtggaaatgagaccaaaaatagcagatgcgtctcctgatgaaggctggaaacggtgtaatgctgcagcacagcttgtacgcaaggaattcactgttaccagcttggatgaaaaccaggaatatgagttcagggtgtgtgcccaaaaccaagttggtattgggcgccctgcagagctaaaggaagctatcaaacctaaagaaatactagaacctccggagattgatttggatgccagcatgaggaaactggtcatagtgagagcaggatgccctattcgtctctttgctatagtgagaggacgaccagcccctaaagtcacttggcgaaaagttggcattgataatgtggtcagaaaaggacaagttgatctggttgacactatggccttccttgtcatccccaattctacccgtgatgactcaggaaaatattccttaacacttgtgaacccagcaggagaaaaggctgtattcgtaaatgtcagagtattagacactcctgggcctgtgtctgatttaaaagtttcagatgtcactaaaacatcatgccatgtgtcctgggcccctcctgaaaacgacggtgggagccaagtgacacattatatcgtggagaaacgtgaggcagacagaaagacatggtcgaccgttaccccagaagttaagaaaacaagcttccatgtaaccaatcttgtccctgggaatgagtattacttcagagtaactgctgtcaacgaatatggccctggcgtcccaacagatgtcccaaaaccagtgcttgcatcagatcctctaagtgagccggatcccccaaggaaattagaagtgactgaaatgaccaagaacagtgccaccttagcctggttacctcccctacgtgatggaggtgctaaaatcgatggctacatcactagttacagagaagaagagcagcctgcagatcgctggacagagtactcagtggtaaaagatctgagccttgttgtcactggcctaaaggaaggaaagaaatacaaatttagagtagcggccagaaatgctgttggagtcagtttgccaagagaagctgaaggagtgtatgaagccaaagaacaactgttgccaccaaagatccttatgccagagcaaataactatcaaagctgggaaaaaactccgaattgaagcccatgtgtatggaaagcctcatcccacctgtaaatggaaaaaaggagaagatgaagttgtcacatccagccacctggcagtgcataaagcagacagctcttcaattctgatcataaaagatgtgactaggaaagacagtggttactacagcctcacagcagagaacagttctgggacagacactcagaaaatcaaagttgtagtcatggatgcccccggcccccctcagcctccatttgacatttctgatatagacgctgatgcttgctccctgtcatggcacatccctctggaggacggaggcagtaacatcaccaattatatagtggagaagtgtgatgtaagccgaggtgactgggtcacggctctagcttcagtcacaaaaacttcctgcagggttggaaagctgatcccaggccaggagtacatcttccgggtccgtgctgaaaaccgatttggcatttcagagcctctcacatctccaaagatggttgcgcagttcccatttggtgttcctagtgaaccaaagaatgcacgagtcaccaaagtcaacaaggactgtatttttgttgcttgggacagaccagatagtgatggagggagccccattattggttatctgattgaacgcaaggaaagaaacagtttgctgtgggtgaaagccaatgatactcttgtccggtcaactgaatatccttgtgctggccttgtagaaggtcttgagtattcattcagaatctatgccctaaacaaagctggatccagcccacccagcaaacccacagaatatgtaactgcaagaatgccagttgatcctcctgggaaacctgaggttattgatgtcaccaagagtactgtatctctgatctgggctcgtccaaagcatgatggaggcagtaaaattattggctatttcgtagaagcttgcaaacttcctggtgataaatgggtacggtgcaatactgcacctcaccagattccccaggaagagtacacagctactggcctagaagagaaagctcagtatcaatttagagctattgccaggaccgcggtaaacattagcccaccttctgaaccttctgatccagtgactatcctcgcagaaaatgtccctcccaggatagacctgagtgtggctatgaaatctttgcttactgtgaaagctggaactaatgtctgcttggatgctactgtttttggtaaaccgatgccaacagtttcttggaaaaaagatggcacactgctaaaaccagcagaaggcataaagatggccatgcagcggaatctgtgcaccttggagctattcagcgtgaaccggaaggactcaggagactataccattactgctgaaaattcaagtggttctaaatcagccaccattaagcttaaagtgttagataaaccgggtcctccagcatctgttaaaatcaacaaaatgtattcagatcgtgctatgctttcttgggaaccgcctcttgaagatggaggctcagaaatcaccaactatattgttgacaaacgtgaaacaagcaggcccaactgggctcaagtctctgcaactgtgcctatcaccagctgcagcgtggagaaacttatagagggccatgagtatcagttccgtatttgtgctgaaaataaatatggagtaggcgatccagtcttcactgaaccagcaattgccaaaaacccatatgacccaccaggacgctgtgatcctcctgttattagcaacataaccaaagatcacatgacagtcagctggaagccaccagcagatgatgggggctcacccatcactggctatttgcttgaaaagcgggaaacccaggctgttaactggactaaggtcaacagaaaacctattatagaaagaacattaaaagcaacaggtcttcaagaaggtaccgaatatgagttccgtgttacagctataaataaagctggaccaggcaaacccagtgacgcatccaaggccgcttatgctcgggaccctcagtatcctcctgcgccaccggctttccctaaagtatatgatacaactcgcagctctgtgagtctatcttggggcaagccagcctatgacggcggcagccctatcattggttatctcgttgaagtaaaacgggctgactccgataactgggtgaggtgcaacttaccacagaatctacagaaaacccgctttgaggttactggcctgatggaagacacacaatatcaattccgtgtgtatgccgttaataagattggatacagtgaccccagtgatgtgccagataaacactatcccaaggacatcttaattccacctgagggagaacttgatgcggacttaaggaagacactcatattacgtgctggagttactatgagactatatgtaccagtaaaaggacgcccacctccaaagattacttggtctaaaccaaatgtcaatctaagagacaggattggactggacataaagtcaactgactttgacactttcttgcgctgtgaaaatgtgaacaaatatgatgcaggaaaatatatcttaaccctggagaacagctgtggtaaaaaggaatataccattgttgtgaaagtgcttgatactcctgggccacctgtcaatgtgactgttaaggaaatatccaaagactctgcttatgttacctgggagcctcccattattgatggcggaagccccatcataaactatgtggtacaaaaacgtgatgcagagaggaaatcctggtctacagtgacaactgagtgctccaaaacaagcttcagagtagctaatttggaggagggaaaatcctacttcttccgagtgtttgctgaaaatgagtatggcattggtgatcccggtgaaactcgtgatgctgtcaaagcttcccaaactcctggaccagttgtggacctgaaagtgaggtctgtatctaagtcatcctgtagcattggctggaaaaagcctcacagtgatggtggaagtcggattattggatatgtagttgatttcctgactgaagaaaataagtggcaacgagttatgaaatccttaagcctacagtactctgcaaaagatttgactgaagggaaggaatataccttcagagtgagtgctgagaatgaaaatggagaaggaaccccaagcgaaatcactgttgtggcaagggatgatgttgtggctcctgatcttgacttaaagggtctacctgatttgtgctacttggctaaagaaaacagcaacttccggcttaagatccccataaaaggcaagccagctccatcagtctcctggaagaaaggggaagatcctctagcaactgacactagagtcagtgttgagtcatctgcggttaacacaactcttatagtgtacgattgccaaaaatctgatgctggaaaatacacaatcacacttaagaatgttgctggcaccaaggaaggaactatctccataaaggttgttggcaagcctggcatccccactggaccaatcaaatttgatgaagtcacagcagaagccatgaccttaaagtgggctcctccaaaggatgatggaggttctgaaatcaccaactatatcctagagaagagggattctgtgaacaacaagtgggtgacgtgcgcctcagctgtccagaaaaccacctttagagtaaccagacttcatgagggcatggaatataccttcagggtcagtgccgaaaataaatatggtgtaggggaaggcctgaaatcggagccaattgttgcgagacatccatttgatgtgcctgatgctcccccacctcccaatattgtggatgtcagacacgattcagtatctctaacttggactgaccccaagaaaactggtggttctccaattacagggtatcatctcgagttcaaggaaagaaacagccttttgtggaagagagctaacaagactccgataaggatgagagactttaaagtgacaggattaactgaaggtcttgaatatgaattccgagttatggcaatcaatttagcaggtgtgggcaagccaagcctaccatcagagcctgttgtggcactggacccaattgatcctcctggaaaacctgaggttattaacataacaaggaattcagtgactctcatttggactgaacctaaatatgacggtggtcataagttaactggatatatagtggagaagcgagatctaccttcgaagtcttggatgaaagccaaccatgttaatgtcccagaatgtgcctttactgtaactgaccttgttgagggtggaaaatatgaattcagaattagagcaaagaatacagcaggtgctatcagtgctccatcagaaagtacagaaaccattatttgcaaggatgaatacgaggcaccaacaattgtccttgatcccacaataaaagatgggctaacaattaaagcaggggataccattgttttgaatgccattagcattcttggcaaaccccttccaaaatcaagttggtccaaggcaggaaaagacattagaccatcagatatcactcagataacttcaaccccaacatcttccatgcttactatcaagtatgccactagaaaagatgcgggtgaatataccatcactgctaccaatccttttggcacgaaggtggaacatgtgaaggtaacagtccttgatgtacctggtcccccaggtcctgttgaaatcagtaatgtttctgctgaaaaagcaacacttacatggacacctcccttggaagatggcggctcaccaattaagtcctatatacttgaaaagagagaaaccagccgacttttgtggacagtggtttctgaagatattcagtcttgcaggcatgtggcaaccaaacttatccaaggaaatgagtacatcttccgggtctcagctgtaaaccactatggcaaaggagaacctgtacagtctgaacctgtcaaaatggtagacagatttggtccccctggccctcctgaaaaaccagaggtatcaaatgtcactaagaacactgccactgtcagctggaaaaggccagtggatgatggtggcagcgaaattacaggatatcatgtagaaaggagagaaaagaaaagcctgcgatgggtgagagcaataaaaacaccagtttccgatctcaggtgcaaagtaacaggactgcaagaaggaagcacctacgaattccgtgtcagtgcagaaaacagagcaggaattggtccacccagtgaggcttcagattctgttctgatgaaagatgcagcatatcctccaggaccaccttcaaatccgcatgtcactgatactaccaagaaatctgcttctttggcatggggcaagcctcattatgatggtggacttgaaatcactggctatgtcgtggagcatcaaaaagtaggagacgaggcctggataaaagataccacaggaaccgccctcagaatcactcagttcgttgttcctgatcttcagactaaagaaaaatacaacttcagaatcagtgccatcaacgatgcaggtgttggggagccagcggtgattccagatgttgaaatcgtagaacgggagatggctcctgattttgaactagatgccgagcttcgaagaacacttgttgttagagcaggactcagtattaggatatttgtgccaattaaaggtcgtcctgctcctgaagtgacatggaccaaagataacatcaacctgaaaaaccgagccaacattgaaaatacggaatcatttactcttctgattatcccagaatgtaacagatatgataccggtaaatttgtcatgaccattgaaaacccggctgggaagaaaagtggctttgtgaacgtcagagtcttggacacgccaggcccagtcctcaacctgcggcctacagacatcacaaaggacagtgtcaccctgcactgggacctccctctgatagatggaggctcacgtataacaaactacattgtagagaaacgtgaagcaacacggaaatcttattccacagccaccactaagtgccataaatgcacatataaagttaccggcttgtctgaagggtgtgaatatttcttcagagtgatggcagagaatgaatatggaattggtgagccaacagaaactacagagcccgtaaaagcctctgaagcaccatctccaccagacagccttaacatcatggacataactaagagcaccgtcagcctggcatggcctaagcccaaacacgatggtggcagcaagatcactggctatgtgattgaagcccaaagaaaaggctctgaccagtggacccacatcacaaccgtgaaagggttagaatgtgttgtgaggaatctaactgaaggagaggaatataccttccaagtgatggcagtgaacagcgcggggagaagtgcccctagagaaagcagacccgtcattgtcaaggagcagacaatgcttccagagctggatctccgtggcatctatcagaaactggtcattgccaaagctggtgacaacatcaaagttgaaattccagtgctcggtcgaccgaagcccacagtgacatggaaaaaaggagaccaaattcttaaacagacacagagagttaattttgaaaccacagcgacttcaaccattttaaatatcaatgagtgtgtcagaagtgatagtgggccctatccattaacagcaaggaacattgtaggagaggttggtgatgtcatcaccattcaagtccatgatatcccagggccacctactggaccaatcaaatttgatgaagtttcatctgattttgtaaccttctcttgggacccacctgagaacgatggtggtgtaccaataagcaactatgtagtggaaatgcggcagactgacagtactacctgggttgagttagcaaccaccgttatacgtactacctataaagccacccgccttactactggattagagtatcagttccgtgtaaaagctcagaatagatatggagttggaccaggcatcacatcagcatgcatagttgccaactatccatttaaggttcctggacctcctggtacccctcaggtaactgcagttaccaaggattcaatgacaattagctggcatgagccactttctgatggtggaagccccattttaggatatcatgttgaaagaaaagaacgaaatggtattctctggcagactgtgagcaaagctttagtaccaggcaacattttcaaatcaagtggacttacagatggtattgcttatgagttccgggtgattgcagaaaacatggcaggcaaaagtaagccaagcaagccatcagaacctatgttggctctggatcccattgacccacctggaaaaccagtacctctaaatattacaagacacacagtaacacttaaatgggctaagcctgaatatactgggggctttaaaattaccagttatatcgttgaaaagagagaccttcctaatggacggtggctgaaggccaacttcagcaacattttggagaatgaatttacagtcagtggcctaacagaagatgctgcatatgaattccgtgtgatcgccaaaaatgctgcaggtgccatcagtccaccatctgagccatctgatgctatcacttgcagggatgatgttgaggcaccaaagataaaggtggatgttaaatttaaggacacggttatattaaaagcaggtgaagcattcagactggaagctgatgtttcaggccgcccacctccaacaatggaatggagcaaagatggaaaagagctggaaggcacagcaaagttagaaataaaaattgcagatttctctactaatctggtaaacaaagattcaacaagaagggatagtggtgcctatacccttacagcgactaatcctggtggctttgctaaacacattttcaatgtcaaagttcttgacagaccaggcccacctgaaggacctttggctgtaactgaagtgacatcagaaaagtgtgtactatcatggttccctccactggatgatggaggtgccaaaattgatcattacatagtacagaaacgtgaaaccagcagattggcatggacaaatgtagcctcagaagtccaagtaacaaagctaaaggtcactaaactcttgaaaggcaatgaatacatattccgtgtcatggctgtaaataaatatggagtgggagagccactggaatcagagcctgtgcttgcagtgaatccttatggaccccctgatccgcccaaaaaccctgaagtgacaactattactaaagattcgatggttgtctgctggggacatcctgattctgatggtggaagtgaaatcatcaattatattgtggaacggcgtgataaagctggccaacgctggattaaatgcaacaaaaaaactcttactgatttaagatataaagtgtctggactgacagaaggacatgaatatgagttcaggattatggctgaaaatgctgctggaattagtgcaccaagtcctaccagtccattttacaaggcttgtgacactgtgtttaaacctggaccaccaggtaacccacgtgttctggatacaagcagatcatccatttcaatcgcttggaataaacctatctatgatggtggttcagaaatcactgggtatatggttgagattgccctgccagaggaagatgaatggcagattgtcactccaccagcaggactcaaggcaacttcgtatactatcactggcctcacagagaatcaggaatataagatccgcatctatgccatgaattccgaaggacttggggaacctgcccttgttcctggaactccaaaggctgaagacagaatgctgcctccagaaattgaactggatgctgacctgcgcaaagttgttactataagggcctgctgcaccctgagactttttgttcccatcaaaggaaggcctgcacctgaggtgaagtgggcccgggaccatggagaatctttagataaagctagcatcgaatccacaagctcttacaccctgcttattgttggaaatgtaaacagatttgacagtggcaaatatatactaactgtagaaaatagttcaggcagcaagtctgcatttgtcaatgttagagttctcgatacaccaggccccccacaggatctgaaggtaaaagaggtcactaagacatctgtcacactcacatgggacccacctctccttgatggaggttcaaaaatcaagaactatattgttgaaaagcgggaatcaacaagaaaagcatattcaactgttgcaacaaactgccacaagacttcctggaaggtagaccagcttcaagaaggctgtagctactatttcagggttctcgcagaaaatgaatatggcattgggctgcctgctgaaaccgcagaatctgtgaaagcatcagaacgacctcttcctccaggaaaaataactttgatggatgtcacaagaaatagtgtgtcactctcttgggagaaaccagagcatgatggaggcagccgaattctaggctacattgtggagatgcagaccaaaggcagtgacaaatgggccacgtgtgccacagtcaaggtcactgaagccactatcactggattaattcagggtgaagaatactctttccgtgtttcagctcagaatgaaaagggcatcagtgatcctagacaactgagtgtgccagtgatcgccaaagatcttgtcattccaccagccttcaaactcctgttcaatactttcactgtactggcaggtgaagacctaaaagttgatgttccattcattggccgccctaccccagctgtaacctggcataaagataatgtaccactgaagcagacaactagagtaaatgcagagagcacagaaaataattcactactgacaataaaggacgcctgccgagaagatgttggccattatgtggttaaactgactaactcagctggtgaagctattgaaacccttaatgttatcgttcttgacaaaccagggcctccaactggaccagttaaaatggatgaagtgacagctgatagtattactctttcctggggcccacccaagtatgatggtggaagttctatcaataattacattgttgagaaacgggacacttccacaaccacctggcaaattgtatcagctacagttgcaaggacaacaataaaggcttgcagactgaagactggatgtgaatatcagtttagaattgcagctgaaaacagatatgggaagagtacctacctcaattcagagcctactgtagcccaatatccattcaaagttcctggtcctcctggcactccagttgtcacactgtcctccagggacagcatggaagtacaatggaatgagccaatcagtgatggaggaagtagagtcattggctatcatctagaacgcaaggaaagaaatagcatcctctgggttaagttgaataaaacacctattcctcaaaccaagtttaagacaactggccttgaagaaggtgttgaatatgaatttagagtctctgcagagaacatcgtgggcattggcaagccgagtaaagtatcagaatgttatgtggctcgtgacccatgtgatccaccaggacggccagaggcaatcattgtcacaaggaattctgtgactcttcagtggaagaaacccacctatgacggtggaagcaagatcactggttatattgttgagaagaaagaattacctgagggccgttggatgaaagccagttttacaaatattattgacactcattttgaagtaactggcctagttgaagatcacagatatgagttccgggttatagcccgaaatgccgcaggagtgtttagtgagccttcagaaagcacaggagcaataacagctagagatgaggtagatccaccacgaataagtatggatccaaaatacaaagacacaatcgtggttcatgctggtgaatcattcaaggttgatgcagatatttatggcaaaccaataccaaccattcagtggataaaaggtgatcaggagctttcaaacacagctcgattagaaataaagagcaccgactttgccaccagtctcagtgtaaaagatgcagtacgtgtcgacagtggaaattacatactgaaggccaaaaatgttgcaggagaaagatcagttactgtgaatgtcaaggttcttgacagaccagggccacctgaaggacctgttgttatctcaggagttacagcagaaaaatgcacactagcttggaaacccccacttcaggatggtgggagtgacatcataaattatattgtggaaaggagagaaaccagccgcttagtttggactgtggttgatgccaatgtgcagactctcagctgcaaggttactaagcttcttgaaggcaatgaatatactttccgtataatggcagtaaacaaatatggtgttggtgaacctcttgaatctgagccagtagttgccaagaatccatttgtagtaccagatgcaccaaaagctccagaagtcacaacagtgaccaaggactcaatgattgttgtatgggaaagaccagcatctgatggtggtagtgaaattcttggatatgttcttgagaaacgggataaagaaggcattagatggacaagatgccataagcgtctgattggagagttgcgcctgagagtaactggactcatagaaaatcacgattatgagttcagagtttctgctgagaatgctgctggacttagtgaaccaagccctccttctgcttaccaaaaggcttgtgatcctatttataaaccaggacccccaaacaaccccaaagtcatagacataaccagatcttcagtattcctttcttggagcaaaccaatatatgatggtggctgtgaaattcaaggatacattgttgaaaaatgtgatgtgagtgttggtgaatggacaatgtgcactccaccaacaggaattaataaaacaaacatagaagtagagaagctgttggaaaagcatgaatacaacttccgtatctgtgctattaataaagctggagttggagaacatgctgacgtccctggacctattatagttgaagaaaaattagaagcaccagacattgatcttgacctagaactaaggaaaatcataaatataagggcaggtggctccttaaggttatttgttcctataaaaggtcgtcctacaccagaagttaaatggggaaaggtggatggtgaaatccgagatgcagctataattgatgtcactagcagtttcacctctcttgttcttgacaatgtcaaccgatatgatagtggaaaatatacgcttacattagaaaacagcagtggaacaaagtctgcctttgttactgtgagagttctggacacgccaagtccacctgttaacctgaaagtcacagaaatcaccaaagactcagtatcaattacatgggaacctcctttgttggatgggggatccaaaataaaaaattacattgttgagaaacgtgaagccacaagaaaatcatatgctgctgttgtaactaactgccataagaattcttggaaaatcgatcagctccaagaaggttgcagttattactttagagtcacagctgagaatgagtatggtattggccttcctgcccagactgctgatccaattaaggttgcagaagtgccacaacctcctggaaaaataactgtggatgatgtcaccagaaacagtgtctctctgagttggacaaaacctgaacatgatggtggcagtaaaatcattcagtatattgtggaaatgcaagctaaacacagtgagaaatggtcagagtgtgctcgagtaaagtctcttcaggcagtaattaccaacctaactcaaggggaagaatatctttttagagttgttgctgtaaatgaaaaggggagaagtgatcctcggtcccttgcagttccaatagttgccaaagatctggtaattgagccagatgtaaaacctgcattcagtagttacagtgtacaggttggccaagatttgaaaatagaagtgccaatttctggacgtcctaagccaaccattacctggactaaagatggtctcccactgaagcagaccacaagaatcaatgttaccgattcactggatctcaccacactcagtattaaagaaactcataaggatgatggtggacaatatggaatcacagttgccaatgttgttggtcagaagacagcatccatcgaaattgtaactctagataaacctgatcctccaaaaggacctgttaaatttgatgacgtcagtgctgaaagtattacattatcttggaaccctccattatatacagggggctgccaaatcaccaactacattgttcagaaaagagatacaaccaccacagtatgggatgttgtttctgctactgttgctagaactacactcaaagtgaccaaactgaaaactggtacagaataccaatttagaatatttgccgaaaacagatatggacaaagctttgccttagagtctgatccaattgtagctcaatatccctacaaagaaccaggccctccaggtacaccatttgccacagccatttccaaagactccatggtcatacagtggcatgaaccagtcaacaatggtggaagccccgtcataggttaccacctggagagaaaagaaagaaacagtattttgtggacaaaggtcaacaaaactattattcatgacacccaattcaaagcacagaatcttgaagaaggcattgaatatgaattcagagtgtatgctgaaaatattgttggtgtaggcaaagcaagcaagaattctgaatgctatgtagccagagatccctgtgacccaccaggaaccccagaaccaataatggttaaaagaaatgaaatcactttacagtggaccaaacctgtgtatgatggtggaagtatgattacaggctacattgtagagaaacgtgatttgcctgatggtcgttggatgaaagctagctttacaaatgtcattgaaactcaatttactgtgtcaggtcttactgaagatcaaagatatgaattcagagtcattgcaaagaatgcagctggtgcaataagtaaaccctctgacagtactggaccaataactgccaaggatgaggttgaactcccaagaatttcaatggatccaaaattcagagacacaattgtggtaaatgctggagaaacattcagacttgaggctgatgtccatggaaagcccctacctaccattgagtggttaagaggagataaggaaattgaagaatctgctagatgtgaaataaagaacacagatttcaaggctttacttattgtaaaagatgcaattagaattgatggtgggcagtatattttaagagcttccaatgttgcaggttctaagtcattcccagtaaatgtaaaagtattagatagaccaggacctccagaagggccagtccaggttactggagtcacttctgaaaaatgctctttaacatggtctccaccacttcaagatggtggcagtgacatttctcactatgttgttgaaaagcgagaaaccagtcgacttgcctggactgttgttgcttcagaagttgtgaccaattctctgaaagttaccaaactcttagaaggtaatgaatatgttttccgtataatggctgtcaacaaatatggtgttggagagcctttggaatctgcaccagtactaatgaaaaatccatttgtgcttcctggaccaccaaaaagcttggaagtcacaaatattgccaaagactccatgaccgtctgttggaaccgtccagatagtgatggtggaagtgagattattggttacattgtagagaaaagagacagaagtggcattcgatggataaaatgtaataaacgccgcattacagatttgcgtctaagagtgacaggattaacagaagatcatgagtatgaattcagggtctctgcagaaaatgctgctggagttggggaaccaagtccagctacagtttattataaagcctgtgatcctgtgttcaaacctggcccacctaccaatgcacacattgtagacaccactaaaaattcaatcacacttgcctggggtaaacccatctatgatggcggcagtgagatcttgggatatgtagtagaaatctgtaaagcagatgaagaagaatggcaaatagttactccacagactggcctgagagtcactcgatttgaaatttcaaaactcactgaacaccaagagtataaaatacgagtctgtgccctcaacaaagttggtttaggtgaggctacatcagttcctggtactgtgaaaccagaagataaacttgaagcacctgaacttgaccttgactccgaattaagaaaaggaattgttgtaagagctggtggatctgccagaattcacattccattcaaaggtcgtccaacgcctgagatcacttggtctcgagaggaaggtgaattcacagataaggtccaaattgaaaagggagtaaactatacccaactatcaatagataactgtgatagaaatgatgctggaaaatacattcttaagttggaaaacagcagtggatcaaagtctgcttttgtaactgtgaaagttcttgacactccaggaccaccacagaatttggcagtcaaagaagtgagaaaagattctgccttcctggtatgggagccacccatcattgatggaggggcaaaggtcaagaactatgtgattgacaaacgtgagtcaaccagaaaagcgtatgctaatgtgagtagtaaatgcagcaaaacaagttttaaagtggaaaaccttacagaaggagccatttattacttcagagtcatggctgaaaatgaatttggagttggtgttccagtggaaactgttgatgccgtgaaagctgctgaacctccttccccaccaggaaaggttacactcactgatgtgtcccagaccagtgcatcacttatgtgggagaaacctgaacatgatggcggtagcagagtcctggggtacgttgttgaaatgcagcccaaaggaactgaaaaatggagcattgtggctgaatccaaagtctgtaatgcagttgttactggtttgagttctggacaagaatatcagttccgtgtcaaggcttataatgagaaaggaaaaagcgatccaagagtgttgggtgttcctgtcatagccaaggacttgactatacagcctagtttaaagttaccatttaacacatatagtatccaagctggagaagatcttaaaatagaaattccagttataggccgaccaagacctaacatttcttgggtcaaagatggtgagcctcttaaacagacaacaagagtaaacgttgaagaaacagctacctcaactgttttgcacattaaagaaggtaacaaagatgactttggaaaatacaccgtaacggcaacaaatagtgcaggcacagcaacagaaaatctcagtgttatcgttttagaaaagcctggacctccagttggcccagttcggtttgatgaagttagtgcagactttgtagtcatatcttgggaacctccagcctatactggtggctgccaaataagcaactacattgtagagaagcgagatacaaccaccaccacttggcacatggtatcagcaacagttgcaagaacaacaattaaaataaccaaactgaaaacaggcacggagtaccagtttagaatttttgctgaaaacaggtatggaaaaagtgccccactggattctaaggcagttattgtacaatatccatttaaagaacctggaccacctggaactccttttgtgacatcaatctcaaaagatcagatgcttgtgcaatggcatgagccagtgaatgatggaggcaccaaaattattggctaccatcttgaacagaaagaaaagaacagtattttatgggtcaagttaaataagacccccattcaggacaccaaattcaaaacaactgggcttgatgagggccttgagtatgagttcaaagtttctgctgaaaatattgttggcattggcaagcctagcaaagtgtcagaatgctttgttgctcgtgatccatgtgacccacctggtcgccctgaagccattgttattacaagaaacaatgtcacactgaaatggaagaaacctgcctatgatggtggtagcaaaataacaggttatattgtagaaaagaaagatctacctgatggccgctggatgaaagccagctttaccaacgtattagaaactgaatttacagtgagtggacttgtagaagaccaaagatatgaatttagagtaattgcaagaaatgcagctggaaactttagtgaaccatctgatagtagtggtgccattactgcaagagatgaaattgatgcaccaaatgcctctctggatccaaaatataaagatgtcatcgttgttcatgcaggagagacttttgttcttgaagccgacatccgtggcaaacctatacctgatgttgtttggtcaaaagatggaaaagaacttgaagaaacagctgctagaatggaaattaaatctactattcagaaaacaactcttgttgtcaaagactgtatacggactgatggaggacaatatattctgaaactcagcaatgttggtggtacaaagtctatacccatcactgtaaaggtacttgacaggccagggcctcctgaagggcctctgaaagttactggagttactgcggaaaaatgttacctggcatggaacccacctttgcaagatggtggtgctaatatttcacattacatcattgaaaagagggagacaagccgactctcttggacccaggtttcaactgaggtacaggcccttaactacaaagttactaaacttcttcctggtaatgagtacattttccgtgtcatggctgtgaataaatatggaattggagagcccttggaatctgggcctgttacggcctgtaatccttataagccaccaggtcctccctcaacacctgaagtctcagcaatcaccaaagattctatggtagtaacatgggcacgcccagtagacgacggaggtaccgaaattgagggctacattcttgaaaaacgagataaggaaggcgttagatggaccaagtgcaacaagaaaacattaacggatctgcggctcagggtaactggtcttaccgaaggccattcctatgaattcagagttgctgctgaaaatgcagctggtgtgggagaacctagtgagccatctgttttctaccgtgcgtgtgatgccttgtatccaccaggtcccccaagcaatccaaaagtgacggacacttccagatcttctgtctccctggcatggagtaagccaatttatgatggtggcgcacctgttaaaggctatgttgtagaggtcaaagaagctgctgcggatgaatggacaacctgcactccaccaacaggattacaaggaaagcagttcacagtgaccaagcttaaagaaaacactgaatataacttccgtatttgtgccatcaattctgaaggtgtaggtgaacctgcaactctacctggctcagtggttgctcaggagaggatagagccaccagaaatagaactcgatgctgatctcagaaaggtggtcgttctgcgtgcaagtgctactttacgcttatttgtcactatcaaaggtcgaccagaacccgaagttaaatgggaaaaggcagaaggcattctcactgacagggctcagatagaggtgaccagctcatttacaatgttggtgattgataatgttaccagatttgacagtggtcggtataatctgacattagaaaataatagtggctccaaaacagcttttgttaacgtcagagttcttgactcaccaagtgcccctgtgaatttgaccataagagaagtgaagaaagactcagtgacgttgtcctgggaaccaccacttattgatggtggagctaagattacaaactacattgtcgaaaaacgagaaactacaagaaaagcctatgctaccattacaaataattgcactaaaactactttcagaattgaaaatctacaagaaggatgttcttactacttccgagtcttggcttccaatgaatatgggattggtttgccagctgaaacaacagaacccgttaaagtgtctgaaccacccctcccacctggaagagtaactcttgttgatgtgacccgtaatacagctacaattaagtgggagaaaccagaaagtgatggtggcagcaaaattactggttatgtggttgaaatgcagactaaagggagtgaaaagtggagcacctgcacacaagttaagactctagaagcaactatatctggcttaactgcaggagaagagtatgtcttcagggtagctgcagttaacgaaaagggaagaagtgatccaagacaacttggagtgccagtaattgcaagggatattgaaataaagccttcagttgagcttcctttccatactttcaatgtaaaggctagagaacaacttaagattgatgtgccattcaaaggaagacctcaagctactgtgaactggagaaaagatggtcagactcttaaagagacaactagagtcaatgtttcttcttcaaagactgtaacatcactatctattaaggaagcttcaaaggaagatgttggaacttatgaattatgtgtttcaaacagtgctggatccataacagttcctattactataattgtccttgacagaccaggacctccaggtcctatacgtattgatgaggttagttgtgacagcataaccatttcttggaatcctccagaatatgatggtggctgccaaattagcaattacattgttgaaaagaaagaaaccacctctacaacatggcacatagtttcacaagcagttgcaagaacatccattaaaatagttcgcctgacaacaggaagtgagtatcagttccgtgtttgtgcagaaaaccgctatggaaagagctcctacagtgaatcttcagctgttgttgcagagtatccattcagtcccccaggtcctcctggtactcctaaagttgtgcatgccacaaaatctaccatgcttgtaacctggcaagtgccagttaatgatggaggaagtcgagtaattggctatcatcttgagtataaagaaagaagcagcattctttggtcaaaagcaaataaaatcctcattgctgatactcaaatgaaagtctccggccttgatgaaggactgatgtatgagtatcgtgtatatgctgaaaatattgctggaattggtaaatgcagtaaatcttgtgaaccagtccctgcaagagatccttgtgaccctcctggacaacctgaagtcacaaatatcacaagaaaatcagtgtcacttaaatggtctaaaccacattatgatggtggagctaagatcacaggatacattgttgaacgcagagaactaccagatggccggtggctgaagtgcaattatactaatatacaagaaacatactttgaagtaactgaacttactgaagatcagcgttatgaattccgggtttttgcaaggaatgctgctgactcagttagtgagccatctgaatccactgggcctattatagttaaagatgatgttgagcctccaagagttatgatggatgtcaagttccgagacgttattgttgtcaaagctggagaggtccttaagataaatgcagacattgcagggcgacctctgccagtaatttcctgggccaaggatggtatagaaattgaagaaagagcaagaacagaaatcatctcaacagacaatcatactttgttaacagttaaagactgtataagacgagacactgggcaatatgtactaacactgaagaatgttgccggcactcggtctgtggccgttaattgcaaagtacttgataagcctggtccaccagcaggaccacttgaaataaatggcctcactgctgagaaatgctctctttcctggggacgtccccaagaagatggtggtgcagatatcgactattacatcgtagaaaaacgtgaaacaagccaccttgcatggacaatatgtgaaggagagttacagatgacatcctgtaaagtaaccaagttactcaaaggcaatgaatatatatttagagtaactggtgttaataaatatggtgttggtgagcccctagagagtgtagctataaaggcactagatccatttacagttccaagtccacccacgtctttggaaattacttctgtgaccaaagaatctatgacactttgctggtcaagacccgagagtgatggaggtagtgaaatatctggatatataattgaaaggcgagagaaaaatagcctaagatgggtgcgtgtaaacaaaaaaccagtttatgatctaagagtgaaatcaacaggacttcgggaaggatgtgaatatgaatatcgtgtttatgcagaaaatgctgctggcctaagtcttccaagtgaaacctctcccttaattagggcagaagatccagtgttcctaccatctcctccatccaaacccaaaattgtggactcaggcaagacaactataactattgcctgggttaagccgctgtttgatggtggggccccgataactggatatactgtagaatacaaaaaatctgatgacactgactggaaaacttccattcagagcttacgagggacagaatatacaataagcggactaacaacaggagctgaatatgttttcagagtaaaatctgtcaataaggttggtgctagtgaccccagtgatagctctgaccctcagatagcaaaggaaagagaagaagaacctttatttgatattgacagtgaaatgaggaagaccttgattgtcaaggctggtgcctcatttaccatgactgtgcctttccgaggaagaccagtacccaatgtcttgtggagtaagccagacactgacctccgtactagagcttatgttgataccacagactcccgtacatcactgaccattgaaaatgccaacagaaatgactctggaaagtacacattaacaattcagaatgttttgagtgctgcttcactgaccttagttgtcaaagttttagataccccaggtcctccaaccaacattactgtgcaagatgtaaccaaagagtctgcagtgttatcctgggatgttcctgaaaacgatggtggagcaccagtgaagaattaccacatagaaaaacgtgaggccagcaagaaagcatgggtctctgtgaccaacaactgtaaccgcctctcctacaaagttaccaatttacaagaaggagctatctattacttcagagtctctggagaaaatgagtttggtgttggtataccagctgaaacaaaggaaggagtaaaaataacagaaaaaccaagcccacctgaaaaacttggagtaacaagtatatccaaagacagtgtttccctgacctggctgaagcctgaacatgatggcggaagcagaattgtacactatgtcgttgaagcactagaaaaaggacagaaaaactgggttaaatgtgcagtggcaaagtcaacccatcacgttgtttccggtctgagagagaattctgaatactttttccgagtgtttgctgaaaatcaagctggcctgagtgacccgagagagcttctgcttcctgttcttattaaggagcaactagaaccacctgaaattgatatgaagaatttcccaagtcacactgtatatgttagagctggttcaaaccttaaagttgacattccaatctctggaaaaccacttcccaaagtgaccttatcaagagatggtgtcccccttaaggcaaccatgagatttaataccgaaattactgctgagaacctgaccatcaatctcaaagaaagtgttacagctgacgctgggagatatgaaatcactgctgccaactccagtggtacaaccaaagctttcattaacattgttgtgctagacaggcctggtcctccaactggccctgttgttattagtgatataactgaagaaagtgtgactctcaaatgggagccacctaagtatgacggtggaagtcaagttaccaactacattctactcaaaagagaaacaagtactgcagtgtggactgaagtgtctgcaacagttgcaagaaccatgatgaaagtcatgaaactgaccacaggagaagaataccaattccgcatcaaggcagaaaaccgctttggcatcagtgatcatatagattcagcttgtgtgactgtcaaactaccatacacaacacctggaccaccatctacaccatgggtcactaatgttactcgagaaagcatcactgtgggctggcatgaaccagtgtcaaatggaggcagtgcagtcgtaggctatcacctggaaatgaaagacagaaacagtattttatggcaaaaagccaacaaactggtcatccgcacaactcacttcaaagtcacaacaatcagtgctggacttatttatgaattcagggtgtatgcagaaaatgctgctggagttggaaaacctagccatccttctgaaccagtcttggcaattgatgcttgtgaacccccaagaaatgttcgtatcactgatatttcaaagaactctgtcagcctttcatggcaacaaccagctttcgatggaggtagcaagattacaggctacattgttgagagacgtgaccttccagatggcagatggaccaaggccagcttcaccaatgttactgaaactcaattcatcatctctggcttgactcagaattcccagtatgaattccgtgtctttgctaggaatgctgttggttccattagcaatccatctgaggttgtagggcccattacttgcatcgattcttatggtggtcctgtaattgatttgcctctagaatatacagaagttgtcaaatacagagcaggtacatctgtgaagctcagagctggcatttctggcaaacctgcgcctactattgagtggtataaagatgataaagaattacaaaccaatgcactggtgtgtgttgaaaataccacggacctcgcatctatactcatcaaagatgccgatcgccttaatagtggatgctatgaattaaaactaaggaatgccatgggctcagcctcagccaccatcagagtacagatccttgacaaaccaggcccacctggtggaccaattgaatttaagactgtaactgctgagaagatcacccttctctggcggcctccagctgatgatggtggtgcaaaaatcactcactacattgtggaaaagcgtgagacaagccgcgttgtgtggtctatggtgtctgaacatttggaagagtgcatcattacaaccaccaaaattatcaaaggaaatgaatacatcttccgggtccgagccgtgaacaaatatggaattggcgagccactggaatctgattccgttgtagccaagaacgcatttgttacacctgggccaccaggcataccagaagtgacaaagattaccaagaattcgatgactgttgtatggagcaggccaattgcagatggcggtagtgatataagtggctatttccttgaaaaacgagacaagaagagcctaggatggtttaaagtactaaaagagactatccgtgacaccagacaaaaagtaacaggactcacagaaaacagtgactatcaatacagagtttgtgctgtaaacgctgctggacagggtccattttctgaaccatctgaattctacaaagctgctgatcctattgatcctccaggtccacctgctaagataagaatcgcagattcaaccaagtcatccatcacccttggctggagtaagcctgtctatgatgggggcagtgctgttactgggtatgttgtcgagataagacaaggagaggaagaggaatggactactgtctctaccaaaggagaggtcagaactacagaatatgtggtatccaacctgaaacctggagtcaattactacttccgggtatctgctgtaaactgtgctggacaaggagaacctatagaaatgaatgaacctgtacaagctaaagatatacttgaggcaccagagattgacctggatgtggctctcagaacttctgttattgccaaagctggtgaagatgtacaagtgttgattccctttaaaggcagacctccacctactgtcacatggagaaaagatgagaagaatcttggcagtgatgccagatacagcattgaaaacactgattcatcctcattactcaccattcctcaagttactcgcaatgatacaggaaaatatattctcacaatagaaaatggagttggtgaacctaagtcttcaactgtgagtgttaaagtgcttgacacaccagctgcctgccagaaactacaggttaaacatgtttctcgaggcacagtcactttgctctgggatcctcctctcattgatggaggatctccaataattaattatgtcattgaaaagagagatgccaccaagagaacatggtctgtcgtgtcacacaaatgttctagcacatccttcaagctaatagatttgtcggagaagactccattcttcttcagagttcttgcagaaaatgaaattggaattggggaaccctgtgaaactacagagccagtgaaggctgctgaagtaccagctcctatacgtgatctctcaatgaaagactcaacaaagacatctgtcatcctcagctggaccaaacctgactttgatggtggtagcgtcatcacagaatatgttgtagaaaggaaaggtaaaggtgaacagacgtggtcccacgctggcataagtaagacatgtgaaattgaggttagccaacttaaggagcagtcagtcctggagttcagagtgtttgccaaaaatgagaaaggactgagtgatcctgtcactattgggccaattacagtgaaagaacttattattacacctgaagttgacctgtcagatatccctggggcacaagtcactgtgagaattgggcacaatgtgcaccttgaattaccttataagggaaaacccaaaccatccatcagttggctgaaagatggcttgccactgaaagaaagtgaatttgttcgcttcagtaaaactgaaaacaaaattactttgagtattaagaatgccaagaaggagcatggaggaaaatacactgttattcttgataatgcagtgtgtagaattgcagtccccattacagtcatcacccttggcccaccatcaaagcccaaaggacccattcgatttgatgaaatcaaggctgatagtgtcatcctgtcatgggatgtacctgaagataatggaggaggagaaattacttgttacagcatcgagaagcgggaaacttcacaaactaactggaggatggtgtgttcaagtgttgccagaacgactttcaaagttcctaatctagtcaaagatgctgagtaccagtttagagtgagagcagaaaacagatacggagtcagccaaccacttgtctcaagcattattgtggcaaaacaccagttcaggattcctggtcccccaggaaagccagttatatacaatgtgacttctgatggcatgtcactaacttgggatgctccagtttatgatggtggttcagaagttactggattccatgttgaaaagaaagaaagaaatagcatcctctggcaaaaagttaatacatcaccaatctctggaagagaatatagagccactggactggtagaaggtctggattaccaattccgtgtatatgctgaaaattctgctggcctaagctcacctagtgacccaagcaaatttaccttagctgtttctccagtagacccacctggcactcctgactacattgatgtcacccgggaaaccatcacacttaaatggaacccaccattgcgtgatggaggcagtaagattgtgggctatagcattgagaaacggcaaggaaatgaacgctgggtgagatgcaactttactgacgtcagtgaatgtcagtacacagttacaggactcagtcctggggatcgctatgagttcagaataattgcaagaaatgctgttggaactataagcccgccctcacagtcttctggcattattatgacaagagatgaaaatgttccaccaatagtagagtttggccctgaatactttgatggtctcattattaagtccggagagagccttagaattaaagctttggtacaaggaagaccagtgcctcgagtaacttggttcaaagatggagtggaaatcgaaaagaggatgaatatggaaataaccgacgtacttggatccaccagcctatttgttagagatgctactcgggaccatcgtggtgtatacacagtggaagccaaaaatgcatctggttctgcaaaagcagaaattaaagtgaaagtacaagatacaccaggaaaagtagttgggccaataagattcaccaatattactggggagaagatgactctgtggtgggatgccccactcaatgacggttgtgctcccataacccactacatcattgaaaaacgggaaaccagcagacttgcctgggcactaattgaggataaatgtgaagcccaaagttacactgccattaaactaataaacggcaatgaataccaattccgtgtttctgcagttaacaagtttggtgttggcaggccacttgattctgatccagtggttgctcaaatacaatatactgttcctgatgcccctggcattccagaacctagcaacataacaggcaacagcattaccctgacatgggcaaggccagaatcagatggtggcagtgaaattcaacagtatatccttgaaagaagagaaaagaaaagcacaagatgggtaaaagtgatcagcaaacgaccaatctctgaaacaagattcaaagtcactggtctgacagaaggcaatgagtatgaattccatgtcatggctgaaaatgctgcaggagttggacctgcaagtggcatctcaagactcattaaatgtagagagcccgtcaacccaccaggtcctcccacagtggtcaaagtaacagacacatcaaagacaactgtgagcttagaatggtccaaaccagtgtttgatggtggcatggaaataattgggtatattattgaaatgtgtaaggccgacttaggagactggcacaaggtgaatgcagaggcatgtgtgaaaacaagatatacagtcactgatctacaagcaggtgaagaatacaaattccgagttagtgctatcaatggtgctggaaaaggcgacagctgtgaagtgactggcacaattaaagcagttgaccggttaacagctcctgagttagacatagatgcaaacttcaaacagactcatgttgttagagctggggccagtattcgcctcttcattgcctaccaaggtagacctactcctacagctgtgtggagcaaaccagactctaaccttagccttcgggctgatatccatacaacagattccttcagcaccctcactgtggaaaactgcaacagaaatgatgcagggaaatatacccttactgtggaaaacaacagtggtagtaagtcaatcacattcaccgtgaaagtgctagacactccaggcccacctggcccaattaccttcaaagatgtgacccggggatctgctacattgatgtgggatgcccctcttcttgacggtggtgcccgaatccatcattatgtggtagagaaacgagaggcaagtcgccgtagttggcaggttatcagtgaaaaatgcactcgtcagatcttcaaggtcaatgacctggccgaaggtgttccgtactatttccgtgtttctgcagtaaatgagtatggtgttggtgagccctatgaaatgccagaaccaattgtagccacagaacagcctgctccacctaggagacttgatgttgttgatactagcaaatcctccgcagtcttagcttggcttaaacctgaccacgatggaggcagccggatcactggctacctgcttgaaatgagacaaaagggatctgacttctgggttgaagctggtcacaccaaacagctaactttcacagtagagcgtcttgttgagaaaactgaatatgaattccgtgtgaaggccaagaatgatgctggctatagtgaacccagagaagccttctcttctgtcatcattaaggagcctcaaatcgagcccactgctgacctcactggaattaccaatcagcttataacttgcaaagcaggaagcccatttaccattgacgtaccaatcagtggtcgtcctgcccccaaagtaacatggaaactggaagaaatgagacttaaagagacagatcgagtgagcattacaacaacaaaagacagaaccacactgactgtaaaggacagcatgagaggtgactctggaagatacttcttgaccctggaaaatacagctggtgttaaaacatttagcgtcacagttgtggtcattggaaggccaggtccagtaaccggccccattgaggtctcatctgtctcagctgaatcgtgtgtcctgtcatggggagaacctaaagatggaggaggcactgaaattactaattacatagttgaaaagcgtgaatcgggtacaacagcttggcagcttgtcaattccagtgtcaagcgcactcaaattaaagtcactcatctcacaaaatacatggaatattctttccgtgtcagttcagagaacagatttggtgtcagcaaacctctagaatcagcaccaataattgctgaacatccatttgtcccaccaagcgctcctaccagacctgaggtctaccatgtgtctgccaatgccatgtctattcgttgggaagaaccctaccacgatggtggcagtaaaatcattggctactgggttgagaagaaagaacgtaatacaattctttgggtgaaagaaaacaaagtgccatgcttagagtgcaactacaaagtaactggtttagtagaaggactggaatatcagttcagaacttatgcactcaatgctgcaggtgttagcaaggccagcgaagcttcaagacctataatggctcaaaatccagttgatgcaccaggcagaccagaggtgacagatgtcacaagatcaacagtatcactgatttggtctgccccagcgtatgatggaggcagcaaggttgtgggctacatcatagagcgtaagccagtcagtgaggtaggagatggtcgctggctgaagtgcaactacaccattgtatctgacaatttcttcaccgtgactgctctcagtgaaggagacacttatgagttccgtgtgttagccaagaatgcagcaggcgtaattagcaaagggtctgaatctacaggccctgtcacttgccgagatgaatacgctccacccaaagccgaactggatgcccgattacacggtgatctggttaccatcagagcaggttctgatcttgttctggatgctgcagttggtggcaaacctgaacccaaaattatctggaccaaaggagacaaggagctagatctctgtgaaaaagtctctttgcagtatactggcaaacgagcaactgctgtgatcaagttctgtgacagaagtgacagtggaaaatacactttaacagtgaaaaatgccagcgggaccaaggccgtgtctgtcatggtcaaagtgcttgattcccctggcccatgtggaaagctcaccgtcagcagagtaacacaggagaagtgcactttagcctggagccttccgcaggaagacggaggagcagaaatcactcactacatcgtggaaagacgcgagactagcaggctcaactgggtgattgttgaaggcgaatgcccaaccctatcctatgtcgttaccaggctcatcaagaacaatgagtacatattccgagtgagggcagtaaacaaatatggccctggtgtgcctgttgaatcagagccaattgtagccagaaactcattcactattccatcaccacccggcatacctgaagaagttgggactggcaaagagcatatcatcattcagtggacaaaacctgaatctgatggtggcaatgaaatcagcaactacctagtagacaaacgtgagaagaagagcctgcgctggacacgtgtcaacaaagactatgtggtgtatgataccaggctgaaggtgaccagcctgatggagggttgtgattaccagttccgggtgaccgcagtgaatgcagctggtaacagtgagcccagcgaagcttccaacttcatctcatgcagagaaccatcatatacccctggaccaccttctgctccaagagttgtggataccaccaaacacagcattagtttggcatggaccaaacccatgtacgatggtggtactgacattgtaggatatgttctggaaatgcaagagaaggacactgatcagtggtaccgagtgcataccaatgccacaataagaaatactgaattcactgtgccagaccttaaaatgggccagaaatattccttcagagttgctgccgtgaacgtgaagggtatgagcgaatacagcgaatcaattgctgaaattgagcccgtggaaagaatagaaataccagatcttgagcttgcagatgatctaaagaagactgtgaccatcagggctggggcctccttgcgcttgatggtgtctgtatctggaagaccacctcctgtcataacgtggagcaagcagggcattgaccttgcaagccgggcaattattgacaccactgagagctactcattgctaatagtggacaaagttaatcggtacgatgctggaaaatacacaattgaagctgaaaaccaatctggcaagaaatcagcaacagtccttgttaaagtctatgatactcctggtccctgtccttcagtgaaagttaaggaagtatcaagagattctgtgactataacttgggaaattcccacgattgatggtggagctccagtcaacaattacatcgttgagaagcgtgaagctgctatgagagcattcaaaacagtaactaccaaatgcagcaagacactttacagaatttctggacttgtagaaggaaccatgtactatttcagagtgctgccagaaaatatttatggcattggagaaccttgtgaaacatctgatgcagtactggtctcagaagtgcctttggtgcctgcaaagctagaagtggtcgatgtcaccaaatccactgttacccttgcctgggaaaaaccactctacgatggtggtagccgactcactggatatgttctcgaggcctgcaaagctggcacagagagatggatgaaggttgtcaccttaaaacccacagtcctagagcacactgttacttccttaaatgaaggtgaacaatacttatttagaataagggcacaaaatgagaaaggtgtgtcagaaccaagagagactgtcacagccgtgactgtacaagacctcagagtgttgccaacaatcgatctttctacaatgcctcagaagaccatccatgtcccagctggcagaccagtagagctggtgatacctattgctggccgtccacctcctgctgcttcctggttctttgctggttctaaactgagagaatcagagcgtgtcacagttgaaactcacactaaagtagctaaattaaccatccgtgaaaccactatcagagatactggagaatacacacttgaattgaagaatgttaccggaactacttcagaaaccattaaagttatcattcttgacaagcctggtccaccaacaggacctattaagattgatgaaattgatgctacatcaattaccatttcctgggaaccacctgaattggacggtggtgctccactgagtggttatgtggtagaacaacgtgacgctcatcgtccaggatggctgcccgtttctgaatcagtgactaggtccacgtttaagtttaccagactcaccgaaggaaatgagtatgtgttccgtgtggctgcaacaaaccgcttcgggattggctcttacttgcagtctgaggtcatagagtgtcgcagcagcatccgtattcctggacccccagaaacattacagatatttgatgtttcccgtgatggcatgacacttacttggtacccaccagaggatgacggtggctcccaagtgactggatatattgtggagcgcaaagaagtgagagcagatcgatgggtccgtgtaaataaagtacctgtgacaatgacacggtaccgctccactggccttactgaaggcttagaatatgaacaccgtgtcacagccattaatgcaagagggtctgggaaaccaagtcgtccttccaaacccatcgttgccatggatccaattgctcctccaggaaagccacaaaacccaagagttactgatacaacaaggacatcagtctccctggcctggagtgttccagaagatgaaggaggatctaaagtcacaggctacttgattgaaatgcaaaaagtagatcaacatgaatggaccaagtgtaacaccactccaaccaagattcgagagtatactctaacacacctacctcagggtgcagaatacaggttccgcgtcctagcttgtaatgctggtggacctggtgagcctgctgaggtaccaggaacagtcaaagtcactgaaatgcttgaatatcctgattatgaacttgatgaaagataccaagaaggtatctttgtaaggcaaggtggcgtcatcagacttaccataccaatcaaaggaaaaccattcccaatatgtaaatggaccaaggaaggccaggatattagtaagcgtgccatgattgcaacatctgaaacacacactgagcttgtgatcaaagaagcagacaggggtgattctggcacttatgacctggttctggaaaataaatgtggcaagaaggctgtctacatcaaggtcagggtgataggaagtcccaacagtccagaagggccactggaatatgatgacatccaagtccgctctgtgagggtcagctggagacctcctgctgatgatggtggtgctgacatcttaggctacatcctcgagagacgagaagtgcctaaagccgcctggtataccattgattccagagtccgaggtacatctctggtggtaaaaggcctcaaagagaatgtagaataccatttccgtgtttcagcagaaaaccagtttggcataagcaaacccttgaaatctgaggaaccagtcacaccaaaaacaccattgaatcctccagaacctccaagcaatcctccagaagtactcgatgtaaccaagagttctgttagcttgtcctggtcccggcccaaagatgatggtggttctagagtcacaggctactacatcgaacgcaaagagacatccactgacaagtgggtcagacacaacaagactcagatcaccaccacaatgtacactgtcacagggcttgttcccgatgctgagtatcagttccgcatcatcgcacagaatgatgttggcctgagtgagaccagccctgcttctgaaccagttgtttgcaaagatccatttgataaaccaagccaaccaggagaacttgagattctttcaatatccaaagatagtgtcactctacagtgggagaaacctgaatgtgatggtggtaaagaaattcttggatactgggttgaatatagacagtctggagacagtgcctggaagaagagcaataaggaacgtattaaggacaagcaattcacaataggaggtttgctggaagctactgagtatgaattcagggtttttgctgagaatgagactgggctgagcagacctcgcagaactgctatgtctataaagactaaactcacatctggagaggccccaggaatacgcaaagaaatgaaggatgttaccacaaaattgggtgaagctgctcaactctcatgccagattgttggaaggcctcttcctgacattaaatggtacagatttggtaaagagctcatacaaagccggaaatacaaaatgtcttcagatggacgcacacacactcttacagtaatgacagaggaacaggaagatgaaggtgtttatacctgcatagccaccaatgaggttggagaagtagaaaccagtagtaagcttctcctgcaagcaacaccgcagttccatcctggttacccactgaaagagaaatattatggagctgtgggttccacacttcggcttcatgttatgtacattggtcgtccagtacctgccatgacttggttccatggtcagaaacttttgcaaaactcagaaaacattactattgaaaacactgagcactatactcatcttgtcatgaagaatgtccaacgtaagactcatgctgggaaatacaaagtccagctcagcaatgtttttggaacagttgatgccatccttgatgtggaaatacaagataaaccagacaaacctacaggaccaattgtgatcgaagctctattgaagaactccgcagtgatcagctggaaaccacccgcagatgacggaggctcctggatcaccaactatgtggtggaaaaatgtgaggccaaggagggggctgaatggcaattggtgtcttcagccatctcagtgacaacctgtagaattgtgaacctcacagaaaatgctggctattacttccgggtttcagctcagaacactttcggcatcagtgaccctctagaagtgtcctcagttgtgatcattaagagtccatttgaaaagccaggtgctcctggcaaaccaactattactgctgtcacaaaagattcttgtgttgtggcctggaagccacctgccagtgatggaggtgcaaagattagaaattactaccttgagaagcgtgagaagaagcagaataaatggatttctgtgacaacagaagaaattcgagaaactgtcttttcagtgaaaaaccttattgaaggtcttgaatacgagtttcgtgtgaaatgtgaaaatctaggtggggaaagtgaatggagtgaaatatcagaacccatcactcccaaatctgatgtcccaattcaggcaccacactttaaagaggaactgagaaatctaaatgtcagatatcagagcaatgctaccttggtctgcaaagtgactggtcatccaaaacctatcgtcaaatggtacagacaaggcaaagaaatcattgcagatggattaaaatataggattcaagaatttaagggtggctaccaccagctcatcattgcaagtgtcacagatgatgatgccacagtttaccaagtcagagctaccaaccaagggggatctgtgtctggcactgcctccttggaagtggaagttccagctaagatacacttacctaaaactcttgaaggcatgggagcagttcatgctctccgaggtgaagtggtcagcatcaagattcctttcagtggcaaaccagatcctgtgatcacctggcagaaaggacaagatctcattgacaataatggccactaccaagttattgtcacaagatccttcacatcacttgttttccccaatggggtagagagaaaagatgctggtttctatgtggtctgtgctaaaaacagatttggaattgatcagaagacagttgaactggatgtggctgatgttcctgacccacccagaggagtcaaagttagtgatgtctcacgagattctgtcaacttaacatggactgagccagcctctgatggtggcagcaaaatcaccaactacattgttgaaaaatgtgcaactactgcagaaagatggctccgtgtaggacaggcccgagaaacacgttataccgtgatcaacttatttggaaaaacaagttaccagttccgggtaatagctgaaaataaatttggtctgagcaagccttcagagccttcagaaccaaccataaccaaagaagataagaccagagctatgaactatgatgaagaggtagatgaaaccagggaagtctccatgactaaagcatctcactcttcaaccaaggaactctatgagaaatatatgattgctgaagatcttgggcgtggtgagtttggaattgtccatcgttgtgttgaaacatcctcaaagaagacatacatggccaaatttgttaaagtcaaagggactgatcaggttttggtaaagaaggaaatttccattctgaatattgctaggcatagaaacatcttacacctccatgaatcatttgaaagcatggaagaattagttatgatctttgagtttatatcaggacttgacatatttgagcgcattaacacaagtgcttttgaacttaatgaaagagaaattgtaagttatgttcaccaggtctgtgaagcacttcagtttttacacagtcataatattggacactttgacattagaccagaaaatatcatttaccaaaccagaagaagctctaccattaaaatcatagaatttggtcaagcccgtcagctgaaaccaggggacaacttcaggcttctattcactgccccagaatactatgcacctgaagtccaccagcatgatgttgtcagcacagccacagacatgtggtcacttggaacactggtatatgtgctattgagtggtatcaacccattcctggctgaaactaaccaacagatcattgagaatatcatgaatgctgaatatactttcgatgaggaagcattcaaagagattagcattgaagccatggattttgttgaccggttgttagtgaaagagaggaaatctcgcatgacagcatcggaggctctccagcacccatggttgaagcagaagatagaaagagtcagtactaaagttatcagaacattaaaacaccggcgttattaccacaccctgatcaagaaagacctcaacatggttgtgtcagcagcccggatctcctgtggtggtgcaattcgatctcagaagggagtgagtgttgctaaagttaaagtggcatccattgaaattggcccagtttctgggcagataatgcatgcagttggtgaagaaggaggacatgtcaaatatgtatgcaaaattgaaaattatgatcagtctacccaagtgacttggtactttggcgtccgacagctggagaacagtgagaaatacgaaatcacctacgaagatggagtggccatcctctatgtcaaagacattaccaaattagatgatggtacctacagatgcaaagtagtcaatgactatggtgaagacagttcttatgcagagctatttgttaaaggtgtgagagaagtctatgactattactgccgtagaaccatgaagaaaattaagcgcagaacagacacaatgagactcctggaaaggccaccagaatttaccctgcctctctataataagacagcttatgtaggtgaaaatgtccggtttggagtaactataactgtccacccagagcctcatgtaacatggtataaatcaggtcagaaaatcaaaccaggtgacaatgacaagaagtacacatttgagtcagacaagggtctttaccaattaacaatcaacagtgtcactacagatgatgacgctgaatatactgttgtggcaaggaacaaatatggtgaagacagctgtaaagcaaagctgacagtaaccctacacccacctccaacagatagtaccttaagacccatgttcaaaaggttactggcaaatgcagaatgccaagaaggccaaagtgtctgctttgagatcagagtgtctggcatccccccaccaacattaaaatgggagaaagatggtcagccactgtccctcgggcctaacattgaaattatccatgaaggcttggattattatgctctgcacatcagggacactttgcctgaagacacgggttattatagagtcacagccactaacacagctgggtccaccagctgccaggctcacctacaagtggaacgcctgaggtacaagaaacaggaattcaagagtaaggaggagcatgagcgacacgtacaaaaacaaattgacaaaaccctcagaatggctgaaattctttctggaactgaaagtgtaccactgacacaggtagctaaagaggctctgagagaagctgctgtcctttataaaccggctgtaagcaccaagactgtaaaaggggaattcagacttgagatagaagaaaagaaggaggagagaaaactccggatgccttatgatgtaccagagccacgcaagtataagcagactaccatagaagaagaccaacgcatcaagcagttcgtgcccatgtctgacatgaagtggtataaaaagatacgtgatcagtatgaaatgcctgggaaacttgacagagttgtacagaaacgacccaagcgcatccgcctttcaagatgggaacagttctatgtgatgcctcttccacgcattacagatcaatacagacctaaatggcgtattcctaaactgtcccaagatgatcttgagatagtgagaccagcccgccggcgtacaccttctcctgattatgacttttactaccgacctagaagacgttctcttggggacatctctgatgaagaattactcctccccattgatgactacttagcaatgaaaagaacagaggaagagaggctgcgtcttgaagaagagcttgagttaggtttttcagcttcacccccaagtcgaagccctccacactttgagctttctagcctacgttactcttcaccacaagctcatgtcaaggtggaggaaacaagaaaagacttcaggtattcaacctatcacatcccaacgaaggctgaagctagtacaagttatgcagaactgagggaacggcatgcccaggctgcgtacagacagccaaagcaacggcaaagaatcatggctgagagggaggatgaagagttgcttcgcccagttacgaccacccagcatctctcagaatacaaaagcgaacttgacttcatgtcaaaggaggaaaagtctagaaagaaatcaaggcgacaaagagaagtgacagaaataacagaaattgaggaagaatacgaaatctcaaaacatgctcaaagagaatcatcctcatctgcgtctagactactgagacgacggcgctccctgtctccaacttatattgagttaatgaggccagtgtctgagctgatccggtcacgtccacaaccggctgaggaatacgaagatgacacagaaagaaggtcacctactccagagagaactcgcccacgatcccccagccctgtgtctagtgagagatcactctcgagatttgagaggtctgcaagatttgatatcttttccaggtatgagtccatgaaagctgctttaaaaactcagaagacatcagaaaggaagtatgaagttttgagtcagcagcctttcacactggaccatgcccctcgaatcacactgagaatgcgctcgcacagggtaccatgtggccaaaatacacgttttattttaaatgttcagtctaagccaactgccgaggttaaatggtaccacaatggtgtggaactccaagaaagcagtaagattcattacaccaacacgagtggagtcctcaccctggaaattctggactgtcatactgatgacagtggaacctaccgtgctgtgtgcaccaactacaagggcgaagcttctgactatgcaacgttggacgtgacaggaggggattataccacctatgcttcccaacgcagagatgaagaggtccccagatctgttttccctgagctgacaagaacagaggcgtatgctgtttcatcatttaagaaaacatctgagatggaagcttcgtcttctgtcagggaagtgaaatcacagatgacggagacaagggaaagtctctcctcatatgaacactctgcatctgcagaaatgaaaagtgctgcattagaagaaaagtcactggaagaaaaatccacaaccagaaagatcaagacgactttggcagcaagaattctaacaaagccacggtccatgaccgtctacgagggcgagtctgcaaggttttcttgtgacaccgatggtgagccggtaccaactgtgacctggctgcgtaaaggacaagtgctaagtacttctgcccgccaccaagtgaccaccacaaagtacaaatcaacctttgagatctcttcagtccaggcttccgatgagggcaattacagcgtggtggtagaaaacagtgaagggaaacaagaagcagagttcactctgactattcaaaaggccagggtaactgaaaaggctgtgacatcaccaccaagagtcaaatccccagagcctcgggtgaaatccccagaagcagttaagtctccaaaacgagtgaaatctccagaaccttctcacccgaaagccgtatcacccacagagacaaaaccaacaccaacagagaaagttcagcacctcccagtctctgccccaccaaagattactcagttcctgaaagcagaagcttctaaagagattgcaaaactgacctgtgtggttgaaagcagtgtattaagggcaaaagaggtcacctggtataaagatggcaagaaactgaaggaaaatgggcatttccagtttcattattcagcagatggtacctatgagctcaaaatcaataacctcactgaatctgatcaaggagaatatgtttgtgagatttctggtgaaggtggaacgtctaaaaccaacttacaatttatggggcaagcctttaagagtatccatgagaaggtatcaaaaatatcagaaactaagaaatcagatcagaaaaccactgagtcaacagtaaccagaaaaactgaaccaaaagctcctgaaccaatttcctcaaaaccagtaattgttactgggttgcaggatacaactgtttcttcagacagtgttgctaaatttgcagttaaggctactggagaaccccggccaactgccatctggacaaaagatggaaaggccattacacaaggaggtaaatataaactctctgaagacaagggagggttcttcttagaaattcataagactgatacttctgacagtggactttatacttgtacagtaaaaaattcagctggatctgtgtcctctagctgcaaattaacaataaaagctataaaagatactgaggcacagaaagtctctacacaaaagacttctgaaattacacctcagaagaaagctgttgtccaagaggaaatttcccaaaaagccctaaggtctgaagaaattaagatgtcagaggcaaaatctcaagaaaagttagccctcaaagaggaagcttcaaaggttctgatttctgaagaagtcaagaaatcagcagcaacctccctggaaaaatccattgtccatgaggaaatcactaaaacatcacaggcatcagaagaagtcagaactcatgctgagattaaagcattttctactcagatgagcataaacgaaggtcaaagactggttttaaaagccaacattgctggtgccactgatgtgaaatgggtactgaatggcgtagagcttaccaactctgaggagtaccgatatggtgtctcaggcagcgatcagaccctaaccatcaagcaagccagtcacagagatgaaggaatcctcacctgcataagcaaaaccaaggaaggaatcgtcaagtgtcagtatgatttgacactgagcaaagaactctcagatgctccagccttcatctcacagcctagatctcaaaatattaatgaaggacaaaatgttctctttacttgtgaaatcagtggcgagccatcccctgaaatcgaatggtttaaaaacaacctgccaatttctatttcttcaaatgtcagcataagccgctccagaaatgtatactcccttgaaatccgaaatgcatcagtcagcgacagtggaaagtacacaattaaggccaaaaatttccgtggccagtgttcagctacagcttccttaatggtccttcctctagttgaagaaccttccagagaggtagtattgagaacaagtggtgacacaagcttgcaaggaagcttctcgtctcagtcagtccaaatgtctgcctccaagcaggaggcctccttcagcagtttcagcagcagcagtgctagcagcatgactgagatgaaatttgcaagcatgtctgcccaaagcatgtcctccatgcaagagtcctttgtagaaatgagttccagcagctttatgggaatatctaatatgacacaactggaaagctcaactagtaaaatgcttaaagcaggcataagaggaattccgcctaaaattgaagctcttccatctgatatcagcattgatgaaggcaaagttctaacagtagcctgtgctttcacgggtgagcctaccccagaagtaacatggtcctgtggtggaagaaaaatccacagtcaagaacaggggaggttccacattgaaaacacagatgacctgacaaccctgatcatcatggacgtacagaaacaagatggtggactttataccctgagtttagggaatgaatttggatctgactctgccactgtgaatatacatattcgatccatttaagagggcctgtgcccttatactctacactcattcttaacttttcgcaaacgtttcacacggactaatctttctgaactgtaaatatttaaagaaaaaaaagtagttttgtatcaacctaaatgagtcaaagttcaaaaatattcatttcaatcttttcataattgttgacctaagaatataatacatttgctagtgacatgtacatactgtatatagccggattaacggttataaagttttgtaccatttattttatgacattttacaatgtaagttttgaaactaactgttggtaggagaaagtttcttatggaacgaataccctgctcaacatttaatcaatctttgtgcctcaacatactgttgatgtctaagtatgcctcagtgggttgagaaaatccccattgaagatgtcctgtccacctaaaagagaatgatgctgtgcatatcacttgatatgtgcaccaatacctactgaatcagaaatgtaaggcattggtgatgtttgcatttaccctcctgtaagcaacactttaacgtcttacattttctctgatgatgtcacacaaaattatcatgacaaatattaccagagcaaagtgtaacggccaacactttgttcgctcattttacgctgtctctgacataaggagtgcctgaatagcttggaaaagtaacatctcctggccatcccttcatttaaccaagctattcaagtattcctatgccagagcagtgccaactcttggaggtcccagagtgcagccaatgcctttgtgtggtagttctaaattttaattgcacctgaaaaacctgggcacctaagcaatgagccacagcaaaaagtaaagaacaacaacaaaataaagctgttgttaaattttaaacaatattactaattgcccaaaatgtcaatttgatgtagttcttttcatgcaagtataaattcaattgttagttataattgttggacctccttgagatagtaacaacaaaataaagcaagctatctgcacctcaaaa

SEQ ID NO: 1035 - DNA, 5826 bp, Homo sapiens
gaggaggagacggcatccagtacagaggggctggacttggacccctgcagcagccctgcacaggagaagcggcatataaagccgcgctgcccgggagccgctcggccacgtccaccggagcatcctgcactgcagggccggtctctcgctccagcagagcctgcgcctttctgactcggtccggaacactgaaaccagtcatcactgcatctttttggcaaaccaggagctcagctgcaggaggcaggatggtctggaggctggtcctgctggctctgtgggtgtggcccagcacgcaagctggtcaccaggacaaagacacgaccttcgaccttttcagtatcagcaacatcaaccgcaagaccattggcgccaagcagttccgcgggcccgaccccggcgtgccggcttaccgcttcgtgcgctttgactacatcccaccggtgaacgcagatgacctcagcaagatcaccaagatcatgcggcagaaggagggcttcttcctcacggcccagctcaagcaggacggcaagtccaggggcacgctgttggctctggagggccccggtctctcccagaggcagttcgagatcgtctccaacggccccgcggacacgctggatctcacctactggattgacggcacccggcatgtggtctccctggaggacgtcggcctggctgactcgcagtggaagaacgtcaccgtgcaggtggctggcgagacctacagcttgcacgtgggctgcgacctcatagacagcttcgctctggacgagcccttctacgagcacctgcaggcggaaaagagccggatgtacgtggccaaaggctctgccagagagagtcacttcaggggtttgcttcagaacgtccacctagtgtttgaaaactctgtggaagatattctaagcaagaagggttgccagcaaggccagggagctgagatcaacgccatcagtgagaacacagagacgctgcgcctgggtccgcatgtcaccaccgagtacgtgggccccagctcggagaggaggcccgaggtgtgcgaacgctcgtgcgaggagctgggaaacatggtccaggagctctcggggctccacgtcctcgtgaaccagctcagcgagaacctcaagagagtgtcgaatgataaccagtttctctgggagctcattggtggccctcctaagacaaggaacatgtcagcttgctggcaggatggccggttctttgcggaaaatgaaacgtgggtggtggacagctgcaccacgtgtacctgcaagaaatttaaaaccatttgccaccaaatcacctgcccgcctgcaacctgcgccagtccatcctttgtggaaggcgaatgctgcccttcctgcctccactcggtggacggtgaggagggctggtctccgtgggcagagtggacccagtgctccgtgacgtgtggctctgggacccagcagagaggccggtcctgtgacgtcaccagcaacacctgcttggggccctccatccagacacgggcttgcagtctgagcaagtgtgacacccgcatccggcaggacggcggctggagccactggtcaccttggtcttcatgctctgtgacctgtggagttggcaatatcacacgcatccgtctctgcaactccccagtgccccagatggggggcaagaattgcaaagggagtggccgggagaccaaagcctgccagggcgccccatgcccaatcgatggccgctggagcccctggtccccgtggtcggcctgcactgtcacctgtgccggtgggatccgggagcgcacccgggtctgcaacagccctgagcctcagtacggagggaaggcctgcgtgggggatgtgcaggagcgtcagatgtgcaacaagaggagctgccccgtggatggctgtttatccaacccctgcttcccgggagcccagtgcagcagcttccccgatgggtcctggtcatgcggctcctgccctgtgggcttcttgggcaatggcacccactgtgaggacctggacgagtgtgccctggtccccgacatctgcttctccaccagcaaggtgcctcgctgtgtcaacactcagcctggcttccactgcctgccctgcccgccccgatacagagggaaccagcccgtcggggtcggcctggaagcagccaagacggaaaagcaagtgtgtgagcccgaaaacccatgcaaggacaagacacacaactgccacaagcacgcggagtgcatctacctgggccacttcagcgaccccatgtacaagtgcgagtgccagacaggctacgcgggcgacgggctcatctgcggggaggactcggacctggacggctggcccaacctcaatctggtctgcgccaccaacgccacctaccactgcatcaaggataactgcccccatctgccaaattctgggcaggaagactttgacaaggacgggattggcgatgcctgtgatgatgacgatgacaatgacggtgtgaccgatgagaaggacaactgccagctcctcttcaatccccgccaggctgactatgacaaggatgaggttggggaccgctgtgacaactgcccttacgtgcacaaccctgcccagatcgacacagacaacaatggagagggtgacgcctgctccgtggacattgatggggacgatgtcttcaatgaacgagacaattgtccctacgtctacaacactgaccagagggacacggatggtgacggtgtgggggatcactgtgacaactgccccctggtgcacaaccctgaccagaccgacgtggacaatgaccttgttggggaccagtgtgacaacaacgaggacatagatgacgacggccaccagaacaaccaggacaactgcccctacatctccaacgccaaccaggctgaccatgacagagacggccagggcgacgcctgtgaccctgatgatgacaacgatggcgtccccgatgacagggacaactgccggcttgtgttcaacccagaccaggaggacttggacggtgatggacggggtgatatttgtaaagatgattttgacaatgacaacatcccagatattgatgatgtgtgtcctgaaaacaatgccatcagtgagacagacttcaggaacttccagatggtccccttggatcccaaagggaccacccaaattgatcccaactgggtcattcgccatcaaggcaaggagctggttcagacagccaactcggaccccggcatcgctgtaggttttgacgagtttgggtctgtggacttcagtggcacattctacgtaaacactgaccgggacgacgactatgccggcttcgtctttggttaccagtcaagcagccgcttctatgtggtgatgtggaagcaggtgacgcagacctactgggaggaccagcccacgcgggcctatggctactccggcgtgtccctcaaggtggtgaactccaccacggggacgggcgagcacctgaggaacgcgctgtggcacacggggaacacgccggggcaggtgcgaaccttatggcacgaccccaggaacattggctggaaggactacacggcctataggtggcacctgactcacaggcccaagactggctacatcagagtcttagtgcatgaaggaaaacaggtcatggcagactcaggacctatctatgaccaaacctacgctggcgggcggctgggtctatttgtcttctctcaagaaatggtctatttctcagacctcaagtacgaatgcagagatatttaaacaagatttgctgcatttccggcaatgccctgtgcatgccatggtccctagacacctcagttcattgtggtccttgtggcttctctctctagcagcacctcctgtcccttgaccttaactctgatggttcttcacctcctgccagcaaccccaaacccaagtgccttcagaggataaatatcaatggaactcagagatgaacatctaacccactagaggaaaccagtttggtgatatatgagactttatgtggagtgaaaattgggcatgccattacattgctttttcttgtttgtttaaaaagaatgacgtttacatataaaatgtaattacttattgtatttatgtgtatatggagttgaagggaatactgtgcataagccattatgataaattaagcatgaaaaatattgctgaactacttttggtgcttaaagttgtcactattcttgaattagagttgctctacaatgacacacaaatcccattaaataaattataaacaagggtcaattcaaatttgaagtaatgttttagtaaggagagattagaagacaacaggcatagcaaatgacataagctaccgattaactaatcggaacatgtaaaacagttacaaaaataaacgaactctcctcttgtcctacaatgaaagccctcatgtgcagtagagatgcagtttcatcaaagaacaaacatccttgcaaatgggtgtgacgcggttccagatgtggatttggcaaaacctcatttaagtaaaaggttagcagagcaaagtgcggtgctttagctgctgcttgtgccgctgtggcgtcggggaggctcctgcctgagcttccttccccagctttgctgcctgagaggaaccagagcagacgcacaggccggaaaaggcgcatctaacgcgtatctaggctttggtaactgcggacaagttgcttttacctgatttgatgatacatttcattaaggttccagttataaatattttgttaatatttattaagtgactatagaatgcaactccatttaccagtaacttattttaaatatgcctagtaacacatatgtagtataatttctagaaacaaacatctaataagtatataatcctgtgaaaatatgaggcttgataatattaggttgtcacgatgaagcatgctagaagctgtaacagaatacatagagaataatgaggagtttatgatggaaccttaaatatataatgttgccagcgattttagttcaatatttgttactgttatctatctgctgtatatggaattcttttaattcaaacgctgaaaagaatcagcatttagtcttgccaggcacacccaataatcagtcatgtgtaatatgcacaagtttgtttttgtttttgttttttttgttggttggtttgtttttttgctttaagttgcatgatctttctgcaggaaatagtcactcatcccactccacataaggggtttagtaagagaagtctgtctgtctgatgatggatagggggcaaatctttttcccctttctgttaatagtcatcacatttctatgccaaacaggaacaatccataactttagtcttaatgtacacattgcattttgataaaattaattttgttgtttcctttgaggttgatcgttgtgttgttgttttgctgcactttttacttttttgcgtgtggagctgtattcccgagaccaacgaagcgttgggatacttcattaaatgtagcgactgtcaacagcgtgcaggttttctgtttctgtgttgtggggtcaaccgtacaatggtgtgggagtgacgatgatgtgaatatttagaatgtaccatattttttgtaaattatttatgtttttctaaacaaatttatcgtataggttgatgaaacgtcatgtgttttgccaaagactgtaaatatttatttatgtgttcacatggtcaaaatttcaccactgaaaccctgcacttagctagaacctcatttttaaagattaacaacaggaaataaattgtaaaaaaggttttctatacatgaaaaaaaaaaaaaaaaaa

SEQ ID NO: 1036 - DNA, 1832 bp, Homo sapiens
gagcggccaggccagcctcggagccagcagggagctgggagctgggggaaacgacgccaggaaagctatcgcgccagagagggcgacgggggctcgggaagcctgacagggcttttgcgcacagctgccggctggctgctacccgcccgcgccagcccccgagaacgcgcgaccaggcacccagtccggtcaccgcagcggagagctcgccgctcgctgcagcgaggcccggagcggccccgcagggaccctccccagaccgcctgggccgcccggatgtgcactaaaatggaacagcccttctaccacgacgactcatacacagctacgggatacggccgggcccctggtggcctctctctacacgactacaaactcctgaaaccgagcctggcggtcaacctggccgacccctaccggagtctcaaagcgcctggggctcgcggacccggcccagagggcggcggtggcggcagctacttttctggtcagggctcggacaccggcgcgtctctcaagctcgcctcttcggagctggaacgcctgattgtccccaacagcaacggcgtgatcacgacgacgcctacacccccgggacagtacttttacccccgcgggggtggcagcggtggaggtgcagggggcgcagggggcggcgtcaccgaggagcaggagggcttcgccgacggctttgtcaaagccctggacgatctgcacaagatgaaccacgtgacaccccccaacgtgtccctgggcgctaccggggggcccccggctgggcccgggggcgtctacgccggcccggagccacctcccgtttacaccaacctcagcagctactccccagcctctgcgtcctcgggaggcgccggggctgccgtcgggaccgggagctcgtacccgacgaccaccatcagctacctcccacacgcgccgcccttcgccggtggccacccggcgcagctgggcttgggccgcggcgcctccaccttcaaggaggaaccgcagaccgtgccggaggcgcgcagccgggacgccacgccgccggtgtcccccatcaacatggaagaccaagagcgcatcaaagtggagcgcaagcggctgcggaaccggctggcggccaccaagtgccggaagcggaagctggagcgcatcgcgcgcctggaggacaaggtgaagacgctcaaggccgagaacgcggggctgtcgagtaccgccggcctcctccgggagcaggtggcccagctcaaacagaaggtcatgacccacgtcagcaacggctgtcagctgctgcttggggtcaagggacacgccttctgaacgtcccctgcccctttacggacaccccctcgcttggacggctgggcacacgcctcccactggggtccagggagcaggcggtgggcacccaccctgggacctaggggcgccgcaaaccacactggactccggccctcctaccctgcgcccagtccttccacctcgacgtttacaagcccccccttccacttttttttgtatgttttttttctgctggaaacagactcgattcatattgaatataatatatttgtgtatttaacagggaggggaagagggggcgatcgcggcggagctggccccgccgcctggtactcaagcccgcggggacattgggaaggggacccccgccccctgccctcccctctctgcaccgtactgtggaaaagaaacacgcacttagtctctaaagagtttattttaagacgtgtttgtgtttgtgtgtgtttgttctttttattgaatctatttaagtaaaaaaaaaattggttctttaaaaaaaaaaaaaaaaa

SEQ ID NO: 1037 - DNA, 8201 bp, Homo sapiens; identical to SEQ ID NO: 640

SEQ ID NO: 1038 - DNA, 2013 bp, Homo sapiens
gcagcagctcagggccgcgccctgggctggcgtcgtgcctagccaaggagaagtttcagtcacgtgccagactttttcttaattacaaactgatagatggtcacatctcaactaacagtattgacgctgtaagagcatcagatttgaaacatatctgtattaatgaagagtgactgcatgcaaacgacaatatgtcaggaaagaaaaaagatcccatagaaatgtttcattctggacagctggtaaaagtctgtgccccaatggttcgatattcaaagttggcttttaggacactagtaagaaaatatagttgtgatctgtgttacacaccaatgattgttgccgctgattttgtcaaatctataaaagccagagacagcgaatttaccacaaatcaaggtgattgcccattgattgttcagtttgctgctaacgatgcaagacttttatctgatgctgctcgtatagtctgtccttatgcgaatggaatagacattaactgtggttgccctcagaggtgggcaatggcagaaggttatggggcttgcttaataaacaagccagagcttgttcaagacatggtgaaacaagtaagaaatcaagtggaaacccctggattttcagtttctattaaaataaggatcaatgatgaccttaaaagaactgtagatctttgtcaaaaggctgaagcaacaggagtttcatggattacagtccatggaagaactgctgaagaaagacatcagccagtgcactatgattccattaaaataattaaggaaaatatgtgtatacctgtaattgctaatggagacatcagaagcttaaaggaagcagaaaatgtgtggcggattactgggacagatggtgtgatggttgcaagaggactcttagcaaacccggccatgtttgctggatatgaggaaaccccactgaaatgcatctgggactgggttgacattgctcttgaactcgggactccttacatgtgtttccatcaacatttaatgtacatgatggaaaagataacttcaaggcaggaaaaaagggtatttaatgctctgtcaagcacatcagcaatcatagattaccttacagaccattatggcatttgactagacttcccaaataattttaatatatacttttagacccacagtgaaaccacagaaggtcatattttgtaccttaaaccagtagctctcaaattttagtataaaaacaattcctgggagcgttttttaaaaatcagttgtagacaccaccctcagagattctgattaggtagatctggagtagacccagaaatacacagtttaaagaaaacccagtggttcaaacatcctgatcatcctaggcaaacattgacaaatactgctctgaatcctgttctatagatattggggggatgggtagagtgggaattttttcctaatcatgtttttaacattttaaaataaaatttaatactaagaaattatggcttatagtatctataaattaacaagaagtatgcaggtgcaaaaaagtggtggaacaaataccaacatccatccaaaatgaaaaagaacaggaaattctgaatagaattgcactcagaacttatattaaaaattccatttggttaatgacattaaatttggtacatttcaaaacttctggtcctccaaagattgaaagcttaataatagctcctagctaaaaagataaaattaattgcaatctaccatatcttaaggtataggaaatttggtgtcaacctggagatgattatatatttgaaatatttcctagagaatagtaaccaggttttgtttttaactttaaaacctaattacttttgtgcctctcagccgttgattgtaactttaaatgccatggtttggagtgttattaatagattttgttatcggtgggcatgcactgcaagaattaagtatctcagactgaaataaaaccgtgataataagtatattgttgccacagaaactgtataggaacataaaaaaaaaa

SEQ ID NO: 1039 - DNA, 1801 bp, Homo sapiens
gcaaggcatagagacaacatagagctaagtaaagccagtggaaatgaagagtcttccaatcctactgttgctgtgcgtggcagtttgctcagcctatccattggatggagctgcaaggggtgaggacaccagcatgaaccttgttcagaaatatctagaaaactactacgacctcaaaaaagatgtgaaacagtttgttaggagaaaggacagtggtcctgttgttaaaaaaatccgagaaatgcagaagttccttggattggaggtgacggggaagctggactccgacactctggaggtgatgcgcaagcccaggtgtggagttcctgatgttggtcacttcagaacctttcctggcatcccgaagtggaggaaaacccaccttacatacaggattgtgaattatacaccagatttgccaaaagatgctgttgattctgctgttgagaaagctctgaaagtctgggaagaggtgactccactcacattctccaggctgtatgaaggagaggctgatataatgatctcttttgcagttagagaacatggagacttttacccttttgatggacctggaaatgttttggcccatgcctatgcccctgggccagggattaatggagatgcccactttgatgatgatgaacaatggacaaaggatacaacagggaccaatttatttctcgttgctgctcatgaaattggccactccctgggtctctttcactcagccaacactgaagctttgatgtacccactctatcactcactcacagacctgactcggttccgcctgtctcaagatgatataaatggcattcagtccctctatggacctccccctgactcccctgagacccccctggtacccacggaacctgtccctccagaacctgggacgccagccaactgtgatcctgctttgtcctttgatgctgtcagcactctgaggggagaaatcctgatctttaaagacaggcacttttggcgcaaatccctcaggaagcttgaacctgaattgcatttgatctcttcattttggccatctcttccttcaggcgtggatgccgcatatgaagttactagcaaggacctcgttttcatttttaaaggaaatcaattctgggccatcagaggaaatgaggtacgagctggatacccaagaggcatccacaccctaggtttccctccaaccgtgaggaaaatcgatgcagccatttctgataaggaaaagaacaaaacatatttctttgtagaggacaaatactggagatttgatgagaagagaaattccatggagccaggctttcccaagcaaatagctgaagactttccagggattgactcaaagattgatgctgtttttgaagaatttgggttcttttatttctttactggatcttcacagttggagtttgacccaaatgcaaagaaagtgacacacactttgaagagtaacagctggcttaattgttgaaagagatatgtagaaggcacaatatgggcactttaaatgaagctaataattcttcacctaagtctctgtgaattgaaatgttcgttttctcctgcctgtgctgtgactcgagtcacactcaagggaacttgagcgtgaatctgtatcttgccggtcatttttatgttattacagggcattcaaatgggctgctgcttagcttgcaccttgtcacatagagtgatctttcccaagagaaggggaagcactcgtgtgcaacagacaagtgactgtatctgtgtagactatttgcttatttaataaagacgatttgtcagttgtttt

SEQ ID NO: 1040 - DNA, 1448 bp, Homo sapiens; identical to SEQ ID NO: 234

SEQ ID NO: 1041 - DNA, 589 bp, Homo sapiens; identical to SEQ ID NO: 971
  misc_feature (442)..(442): n is a, c, g, or t
  misc_feature (530)..(530): n is a, c, g, or t
  misc_feature (543)..(543): n is a, c, g, or t
  misc_feature (561)..(561): n is a, c, g, or t

SEQ ID NO: 1042 - DNA, 378 bp, Homo sapiens; identical to SEQ ID NO: 982

SEQ ID NO: 1043 - DNA, 1666 bp, Homo sapiens; identical to SEQ ID NO: 4

SEQ ID NO: 1044 - DNA, 1182 bp, Homo sapiens; identical to SEQ ID NO: 1033

SEQ ID NO: 1045 - DNA, 82027 bp, Homo sapiens; identical to SEQ ID NO: 1034

SEQ ID NO: 1046 - DNA, 5826 bp, Homo sapiens; identical to SEQ ID NO: 1035

SEQ ID NO: 1047 - DNA, 1832 bp, Homo sapiens; identical to SEQ ID NO: 1036

SEQ ID NO: 1048 - DNA, 2013 bp, Homo sapiens; identical to SEQ ID NO: 1038

SEQ ID NO: 1049 - DNA, 1801 bp, Homo sapiens; identical to SEQ ID NO: 1039

SEQ ID NO: 1050 - DNA, 2321 bp, Homo sapiens; identical to SEQ ID NO: 208
